(19) United States
(12) Patent Application Publication
(10) Pub. No.: US 2009/0291479 A1
(43) Pub. Date: Nov. 26, 2009

(54) MANIPULATION OF ACYL-COA BINDING PROTEIN EXPRESSION FOR ALTERED LIPID PRODUCTION IN MICROBIAL HOSTS

(75) Inventors: Seung-Pyo Hong, Hockessin, DE (US); Zhixiong Xue, Chadds Ford, PA (US)

Correspondence Address: E I DU PONT DE NEMOURS AND COMPANY;LEGAL PATENT RECORDS CENTER, BARLEY MILL PLAZA 25/1122B, 4417 LANCASTER PIKE, WILMINGTON, DE, 19805, US

(73) Assignee: E. I. DU PONT DE NEMOURS AND COMPANY, Wilmington, DE (US)

(21) Appl. No.: 12/469,026

(22) Filed: May 20, 2009

Related U.S. Application Data
(60) Provisional application No. 61/055,511, filed on May 23, 2008.

(51) Int. Cl. C12P 7/64; C12N 1/15; C12N 1/19

(52) U.S. Cl. 435/134; 435/254.1; 435/255.4; 435/255.3

(57) ABSTRACT

Acyl-CoA binding protein [“ACBP”] binds thiol esters of long fatty acids and coenzyme A in a one-to-one binding mode with high specificity and affinity. This protein is expected to play an important role in altering lipid production in oleaginous microbial organisms. Knock-out of the protein in the oleaginous yeast, Yarrowia lipolytica, results in a decrease in the total lipid content, while overexpression results in an increase in the total lipid content of the recombinant Yarrowia cells.

[0001] This application claims the benefit of U.S. Provisional Application No. 61/055,511, filed May 23, 2008, the contents of which are hereby incorporated by reference.

### FIELD OF THE INVENTION

[0002] This invention is in the field of biotechnology and, in particular, concerns an acyl-CoA binding protein [“ACBP”] and its use to manipulate lipid content in oleaginous microbial organisms.

### BACKGROUND OF THE INVENTION

[0003] A variety of different hosts including plants, algae, fungi, stramenopiles and yeast are being investigated as means for commercial polyunsaturated fatty acid [“PUFA”] production. As technology has developed, there is increasing emphasis on the ability to engineer microorganisms for production of “designer” lipids and oils, wherein the fatty acid content and composition are carefully specified by genetic engineering, to produce oils having the specific oil content and composition that is sought for e.g., pharmaceuticals, dietary substitutes, medical foods, nutritional supplements, other food products, industrial oleochemicals and/or other end-use applications.

[0004] Most free fatty acids become esterified to coenzyme A [“CoA”], to yield acyl-CoAs. These molecules are then substrates for glycerolipid synthesis in the endoplasmic reticulum of the cell, where phosphatidic acid and diacylglycerol [“DAG”] are produced. Either of these metabolic intermediates may be directed to membrane phospholipids (e.g., phosphatidylglycerol, phosphatidylethanolamine, phosphatidylcholine) or DAG may be directed to form triacylglycerols [“TAGs”], the primary storage reserve of lipids in eukaryotic cells.

[0005] U.S. Pat. No. 7,267,976 describes the cloning of phospholipid:diacylglycerol acyltransferases [“PDAT”] and diacylglycerol acyltransferases (i.e., DGAT2) for altering PUFA and oil content in oleaginous yeast. U.S. Pat. No. 7,273,746 identifies nucleic acid fragments encoding diacylglycerol acyltransferases (i.e., DGAT1) and acyl-CoA:sterol-acyltransferases, useful for altering the quantity of oil in oleaginous microorganisms, such as oleaginous yeast.

[0006] Applicants' Assignee's copending published patent application U.S. 2006-0094088 teaches a method of manipulating DAG ATs and PDATs as a means to increase the percent of PUFAs, relative to the total fatty acids [“TFAs”], in the total lipid and oil fractions of an oleaginous organism.

[0007] Various mutant DGAT2 sequences derived from Yarrowia lipolytica are disclosed in Applicants' Assignee's International Application having Publication No. WO 2008/147935 which published on Dec. 4, 2008.

[0008] The disclosures cited above teach various enzymes and mechanisms that are useful for the recombinant production of PUFAs. However, commercial production of PUFAs will be enhanced by systems having increased rates of production, which may be effected by alterations in cellular carbon flux in the relevant pathways. There is a need to enhance the enzymatic activity of the relevant biosynthetic pathways to increase the overall rate of lipid and/or PUFA production.

[0009] It has been found that modifying expression of an acyl-CoA binding protein [“ACBP”] in oleaginous microbial organisms, can be used to regulate TFA content and/or fatty acid composition. Specifically, ACBP selectively binds medium and long chain acyl-CoA esters with high specificity and affinity. In vitro studies indicate that ACBP may regulate the availability of acyl-CoA esters in intermediary lipid metabolism. Various ACBP studies have been performed in yeast, such as Mandrup, S. et al. (Biochem. J., 290:369-374 (1993)), Knudsen, J. et al. (Biochem. J., 302(2):479-485 (1994)), Schjerling, C. K. et al. (J. Biol. Chem., 271:22514-22521 (1996)) and Gaigg, B. et al. (Mol. Biol. Cell, 12:1147-1160 (2001)). However, to date, no one has studied the effect of ACBP disruption or overexpression in an oleaginous organism, such as those engineered for high-level production of PUFAs.

### SUMMARY OF THE INVENTION

[0010] In one embodiment, the invention concerns an oleaginous microbial organism, comprising:
[0011] (i) a recombinant construct comprising at least one isolated polynucleotide comprising a nucleic acid sequence encoding an acyl-CoA binding protein operably linked to at least one regulatory sequence; and
[0012] (ii) a source of fatty acids.

[0013] The oleaginous microbial organism may additionally comprise a recombinant construct having at least one sequence encoding a diacylglycerol acyltransferase selected from the group consisting of DGAT1, DGAT2 and DGAT1 in combination with DGAT2.

[0014] In a second embodiment, the invention concerns an oleaginous microbial organism, comprising:
[0015] (i) a disruption in the native gene encoding an acyl-CoA binding protein; and
[0016] (ii) a source of fatty acids.

[0017] Also in a third embodiment, the invention concerns a method for modifying total lipid content in an oleaginous microbial organism, comprising:
[0018] a) providing an oleaginous microbial organism, comprising:
   [0019] (i) a recombinant construct comprising at least one isolated polynucleotide comprising a nucleic acid sequence encoding an acyl-CoA binding protein operably linked to at least one regulatory sequence; and
   [0020] (ii) a source of fatty acids;
[0021] b) growing the cell of step (a) under conditions whereby transfer of the fatty acids to lipid fractions of the organism is altered by altering expression of the isolated polynucleotide comprising a nucleic acid sequence encoding an acyl-CoA binding protein; and
[0022] c) optionally recovering the total lipid fractions of step (b).

[0023] In a fourth embodiment, the invention concerns a method for modifying fatty acid composition in an oleaginous microbial organism, comprising:
[0024] a) providing an oleaginous microbial organism, comprising:
   [0025] (i) a recombinant construct comprising at least one isolated polynucleotide comprising a nucleic acid sequence encoding an acyl-CoA binding protein operably linked to at least one regulatory sequence; and
   [0026] (ii) a functional ω-3/ω-6 fatty acid biosynthetic pathway comprising at least one isolated polynucleotide comprising a nucleic acid sequence encoding a desaturase enzyme for biosynthesis of fatty acids;
[0027] b) growing the cell of step (a) under conditions whereby the expression of the acyl-CoA binding protein is altered, resulting in an altered rate of desaturation by the at least one desaturase enzyme and an altered transfer of the synthesized fatty acids to lipid fractions of the organism;
[0028] c) optionally recovering the lipid fractions of step (b); and,
[0029] d) optionally determining the modified fatty acid composition of the lipid fractions of step (c).

[0030] In a fifth embodiment, the invention concerns a method for increasing the total lipid content in a Yarrowia sp., comprising:
[0031] a) providing Yarrowia sp., comprising:
   [0032] i) a recombinant construct comprising at least one isolated polynucleotide comprising a nucleic acid sequence encoding an acyl-CoA binding protein, said protein selected from the group consisting of:
      [0033] (a) a protein consisting essentially of the sequence set forth in SEQ ID NO:2; and
      [0034] (b) a protein comprising the following amino acid sequence motifs: SEQ ID NO:36, SEQ ID NO:37 and SEQ ID NO:38;
   [0035] wherein said isolated polynucleotide is operably linked to at least one regulatory sequence; and
   [0036] ii) a source of fatty acids;
[0037] b) growing the Yarrowia sp. of step (a) under conditions whereby the expression of the acyl-CoA binding protein results in an increased total lipid content of at least 5% when compared to the total lipid content of a Yarrowia sp. lacking said recombinant construct; and,
[0038] c) optionally recovering the total lipids of step (b).

### Biological Deposits

[0039] The following biological material has been deposited with the American Type Culture Collection (ATCC), 10801 University Boulevard, Manassas, Va. 20110-2209, and bears the following designation, accession number and date of deposit.

| Biological Material | Accession No. | Date of Deposit |
|---|---|---|
| Yarrowia lipolytica Y4128 | ATCC PTA-8614 | Aug. 23, 2007 |

[0040] The biological material listed above was deposited under the terms of the Budapest Treaty on the International Recognition of the Deposit of Microorganisms for the Purposes of Patent Procedure. The listed deposit will be maintained in the indicated international depository for at least 30 years and will be made available to the public upon the grant of a patent disclosing it. The availability of a deposit does not constitute a license to practice the subject invention in derogation of patent rights granted by government action.

### BRIEF DESCRIPTION OF THE DRAWINGS AND SEQUENCE LISTINGS

[0041] FIG. 1 is a representative ω-3 and ω-6 fatty acid biosynthetic pathway, and should be viewed together when considering the description of this pathway below.

[0042] FIG. 2 diagrams the development of Yarrowia lipolytica strain Y4305U.

[0043] FIG. 3 provides a plasmid map for pYPS161-ACBP.

[0044] FIG. 4 provides plasmid maps for the following: (A) pZP2-Pex; and, (B) pZP2-YACBP.

[0045] The invention can be more fully understood from the following detailed description and the accompanying sequence descriptions, which form a part of this application.

[0046] The following sequences comply with 37 C.F.R. §1.821-1.825 (“Requirements for Patent Applications Containing Nucleotide Sequences and/or Amino Acid Sequence Disclosures—the Sequence Rules”) and are consistent with World Intellectual Property Organization (WIPO) Standard ST.25 (1998) and the sequence listing requirements of the EPO and PCT (Rules 5.2 and 49.5(a-bis), and Section 208 and Annex C of the Administrative Instructions). The symbols and format used for nucleotide and amino acid sequence data comply with the rules set forth in 37 C.F.R. §1.822.

[0047] SEQ ID NOs:1-38 are ORFs encoding genes or proteins (or portions thereof), primers, or plasmids, as identified in Table 1.

TABLE 1
Summary Of Nucleic Acid And Protein SEQ ID Numbers

| | Nucleic acid | Protein |
|---|---|---|
| Description and Abbreviation | SEQ ID NO. | SEQ ID NO. |
| Yarrowia lipolytica ACBP | 1 (261 bp) | 2 (86 AA) |
| Yarrowia lipolytica DGAT1 | 3 (1581 bp) | 4 (526 AA) |
| Yarrowia lipolytica DGAT2 | 5 (2119 bp) | 6 (514 AA) |
| Yarrowia lipolytica DGAT2 | 7 (1545 bp) | 8 (514 AA) |
| Yarrowia lipolytica DGAT2 comprising | — | 9 (514 aa) |
| codon 326 mutated from Tyr to Phe | | |
| Yarrowia lipolytica DGAT2 comprising | — | 10 (514 aa) |
| codon 326 mutated from Tyr to Leu | | |
| Yarrowia lipolytica DGAT2 comprising | — | 11 (514 aa) |
| codon 327 mutated from Arg to Lys | | |
| Plasmid pYPS161 | 12 (7966 bp) | — |
| Plasmid pYPS161-ACBP | 13 (7334 bp) | — |
| PCR primer ACBPFii | 14 | — |
| PCR primer ACBPRii | 15 | — |
| PCR primer 3UTR-URA3 | 16 | — |
| PCR primer 3R-ACBPn | 17 | — |
| Real time PCR primer ef-324F | 18 | — |
| Real time PCR primer ef-392R | 19 | — |
| Real time PCR primer ACB1-378F | 20 | — |
| Real time PCR primer ACB1-474R | 21 | — |
| Nucleotide portion of TaqMan probe ef-345T | 22 | — |
| Nucleotide portion of TaqMan probe ACB1- | 23 | — |
| 398T | | |
| Primer ACBP-F | 24 | — |
| Primer ACBP-R | 25 | — |
| Plasmid pZP2-Pex10 | 26 (8784 bp) | — |
| Plasmid pZP2-YACBP | 27 (7899 bp) | — |
| Primer YDGAT1-F | 28 | — |
| Primer YDGAT1-R | 29 | — |
| Primer YDGAT2-F | 30 | — |
| Primer YDGAT2-R | 31 | — |
| Plasmid pFBAIN-MOD-1 | 32 (6991 bp) | — |
| Plasmid pFBAIN-YDGAT1 | 33 (8568 bp) | — |
| Plasmid pFBAIN-YDGAT2 | 34 (8532 bp) | — |
| Plasmid pZKUM | 35 (4313 bp) | — |
| Motif #1 | — | 36 |
| Motif #2 | — | 37 |
| Motif #3 | — | 38 |

### DETAILED DESCRIPTION OF THE INVENTION

[0048] New methods utilizing acyl-CoA binding protein [“ACBP”] enzymes and genes encoding the same are disclosed herein, that may be used for the manipulation of the lipid and oil content in oleaginous microbial organisms, particularly those oleaginous organisms producing polyunsaturated fatty acids [“PUFAs”] within their lipid and oil fractions.

[0049] PUFAs, or derivatives thereof, are used as dietary substitutes, or supplements, particularly infant formulas, for patients undergoing intravenous feeding or for preventing or treating malnutrition. Alternatively, the purified PUFAs (or derivatives thereof) may be incorporated into cooking oils, fats or margarines formulated so that in normal use the recipient would receive the desired amount for dietary supplementation. The PUFAs may also be incorporated into infant formulas, nutritional supplements or other food products and may find use as anti-inflammatory or cholesterol lowering agents. Optionally, the compositions may be used for pharmaceutical use (human or veterinary).

[0050] All patents, patent applications, and publications cited herein are incorporated by reference in their entirety.

[0051] In the context of this disclosure, a number of terms and abbreviations are used. The following definitions are provided.

[0052] “Co-enzyme A” is abbreviated CoA.

[0053] “Acyl-CoA binding protein” is abbreviated ACBP.

[0054] The term “invention” or “present invention” as used herein is not meant to be limiting to any one specific embodiment of the invention but applies generally to any and all embodiments of the invention as described in the claims and specification.

[0055] The term “fatty acids” refers to long-chain aliphatic acids (alkanoic acids) of varying chain lengths, from about C₁₂ to C₂₂, although both longer and shorter chain-length acids are known. The structure of a fatty acid is represented by a simple notation system of “X:Y”, where X is the total number of carbon [“C”] atoms in the particular fatty acid and Y is the number of double bonds. Additional details concerning the differentiation between “saturated fatty acids” versus “unsaturated fatty acids”, “monounsaturated fatty acids” versus “polyunsaturated fatty acids” [“PUFAs”], and “omega-6 fatty acids” [“ω-6” or “n-6”] versus “omega-3 fatty acids” [“ω-3” or “n-3”] are provided in U.S. Pat. No. 7,238,482, which is hereby incorporated herein by reference.

[0056] Nomenclature used to describe PUFAs herein is shown in Table 2. In the column titled “Shorthand Notation”, the omega-reference system is used to indicate the number of carbons, the number of double bonds and the position of the double bond closest to the omega carbon, counting from the omega carbon (which is numbered 1 for this purpose). The remainder of the Table summarizes the common names of ω-3 and ω-6 fatty acids and their precursors, the abbreviations that will be used throughout the specification and the chemical name of each compound.

TABLE 2
Nomenclature Of Polyunsaturated Fatty Acids And Precursors

| | | | Shorthand |
|---|---|---|---|
| Common Name | Abbreviation | Chemical Name | Notation |
| Myristic | — | tetradecanoic | 14:0 |
| Palmitic | Palmitate | hexadecanoic | 16:0 |
| Palmitoleic | — | 9-hexadecenoic | 16:1 |
| Stearic | — | octadecanoic | 18:0 |
| Oleic | — | cis-9-octadecenoic | 18:1 |
| Linoleic | LA | cis-9,12-octadecadienoic | 18:2 ω-6 |
| γ-Linolenic | GLA | cis-6,9,12-octadecatrienoic | 18:3 ω-6 |
| Eicosadienoic | EDA | cis-11,14-eicosadienoic | 20:2 ω-6 |
| Dihomo-γ- | DGLA | cis-8,11,14-eicosatrienoic | 20:3 ω-6 |
| linolenic | | | |
| Sciadonic | SCI | cis-5,11,14-eicosatrienoic | 20:3b ω-6 |
| Arachidonic | ARA | cis-5,8,11,14- | 20:4 ω-6 |
| | | eicosatetraenoic | |
| α-Linolenic | ALA | cis-9,12,15-octadecatrienoic | 18:3 ω-3 |
| Stearidonic | STA | cis-6,9,12,15- | 18:4 ω-3 |
| | | octadecatetraenoic | |
| Eicosatrienoic | ETrA | cis-11,14,17-eicosatrienoic | 20:3 ω-3 |
| Eicosa- | ETA | cis-8,11,14,17- | 20:4 ω-3 |
| tetraenoic | | eicosatetraenoic | |
| Juniperonic | JUP | cis-5,11,14,17- | 20:4b ω-3 |
| | | eicosatetraenoic | |
| Eicosa- | EPA | cis-5,8,11,14,17- | 20:5 ω-3 |
| pentaenoic | | eicosapentaenoic | |
| Docosatrienoic | DRA | cis-10,13,16-docosatrienoic | 22:3 ω-6 |
| Docosa- | DTA | cis-7,10,13,16- | 22:4 ω-6 |
| tetraenoic | | docosatetraenoic | |
| Docosa- | DPAn-6 | cis-4,7,10,13,16- | 22:5 ω-6 |
| pentaenoic | | docosapentaenoic | |
| Docosa- | DPA | cis-7,10,13,16,19- | 22:5 ω-3 |
| pentaenoic | | docosapentaenoic | |
| Docosa- | DHA | cis-4,7,10,13,16,19- | 22:6 ω-3 |
| hexaenoic | | docosahexaenoic | |

[0057] The term “oleaginous” refers to those organisms that tend to store their energy source in the form of lipid (or “oil”) (Weete, In: Fungal Lipid Biochemistry, 2^{nd} Ed., Plenum, 1980). And, for the purposes herein, oleaginous organisms include bacteria, algae, moss, yeast, fungi and plants that have the ability to produce oils.

[0058] The term “oleaginous yeast” refers to those microorganisms classified as yeasts that can make oils. Generally, the cellular oil or triacylglycerol content of oleaginous microorganisms follows a sigmoid curve, wherein the concentration of lipid increases until it reaches a maximum at the late logarithmic or early stationary growth phase and then gradually decreases during the late stationary and death phases (Yongmanitchai and Ward, Appl. Environ. Microbiol. 57:419-25 (1991)). It is not uncommon for oleaginous microorganisms to accumulate in excess of about 25% of their dry cell weight as oil. Examples of oleaginous yeast include, but are no means limited to, the following genera: Yarrowia, Candida, Rhodotorula, Rhodosporidium, Cryptococcus, Trichosporon and Lipomyces.

[0059] The term “total lipid fraction” of cells herein refers to all esterified fatty acids of the cell. Various subfractions within the total lipid fraction can be isolated, including the diacylglycerol, monoacylglycerol and triacylglycerol [“TAG” or “oil”] fractions, phosphatidylcholine fraction and the phosphatidyletanolamine fraction, although this is by no means inclusive of all sub-fractions.

[0060] The terms “triacylglycerols” [“TAGs”] and “oil” are interchangeable and refer to neutral lipids composed of three fatty acyl residues esterified to a glycerol molecule. TAGs can contain long chain PUFAs, as well as shorter saturated and unsaturated fatty acids and longer chain saturated fatty acids. The TAG fraction of cells is also referred to as the “oil fraction”, and “oil biosynthesis” generically refers to the synthesis of TAGs in the cell. The oil or TAG fraction is a sub-fraction of the total lipid fraction, although it also constitutes a major part of the total lipid content, measured as the weight of total fatty acids in the cell as a percent of the dry cell weight [infra], in oleaginous organisms. The fatty acid composition in the TAG fraction and the fatty acid composition of the total lipid fraction are generally similar. Thus, an increase or decrease in the concentration of PUFAs in the total lipid fraction will correspond with an increase or decrease in the concentration of PUFAs in the TAG fraction, and vice versa.

[0061] The term “total fatty acids” [“TFAs”] herein refers to the sum of all cellular fatty acids that can be derivitized to fatty acid methyl esters [“FAMEs”] by the base transesterification method (as known in the art) in a given sample, which may be the total lipid fraction or the oil fraction, for example. Thus, total fatty acids include fatty acids from neutral and polar lipid fractions, including the phosphatidylcholine fraction, the phosphatidyletanolamine fraction and the diacylglycerol, monoacylglycerol and triacylglycerol [“TAG” or “oil”] fractions but not free fatty acids.

[0062] The term “total lipid content” of cells is a measure of TFAs as a percent of the dry cell weight [“DCW”]. Thus, total lipid content [“TFAs % DCW”] is equivalent to, e.g., milligrams of total fatty acids per 100 milligrams of DCW.

[0063] Generally, the concentration of a fatty acid is expressed herein as a weight percent of TFAs [“% TFAs”], e.g., milligrams of the given fatty acid per 100 milligrams of TFAs. Unless otherwise specifically stated in the disclosure herein, reference to the percent of a given fatty acid with respect to total lipids is equivalent to concentration of the fatty acid as % TFAs (e.g., % EPA of total lipids is equivalent to EPA % TFAs).

[0064] In some cases, it is useful to express the content of a given fatty acid(s) in a cell as its percent of the dry cell weight [“% DCW”]. Thus, for example, eicosapentaenoic acid % DCW would be determined according to the following formula: (eicosapentaenoic acid % TFAs)*(TFA % DCW)]/100.

[0065] The terms “lipid profile” and “lipid composition” are interchangeable and refer to the amount of an individual fatty acid contained in a particular lipid fraction, such as in the total lipid fraction or the oil [“TAG”] fraction, wherein the amount is expressed as a percent of TFAs. The sum of each individual fatty acid present in the mixture should be 100.

[0066] The term “acyl CoA binding protein” [“ACBP”] refers to a small (−10 kD) intracellular lipid-binding protein that is structurally and functionally conserved from yeast to mammals. ACBP selectively binds medium and long chain acyl-CoA esters with high specificity and affinity (although ACBP is unable to bind free fatty acids) and efficiently protects acyl-CoA esters from hydrolysis by thioesterases. In vitro studies indicate that ACBP may regulate the availability of acyl-CoA esters for intermediary lipid metabolism. Based on the high degree of sequence conservation, a significant number of ACBP proteins have been identified (see, e.g., FIG. 1 of PCT Publication No. WO 2002/061096 A1; Burton, M. et al., Biochem. J., 392:299-307 (2005)), which can generally be divided into 4 distinct groups: the generally expressed ACBP isoform, first isolated from bovine liver; the testis specific isoform (also called endozopine-like protein); a brain specific isoform; and, longer, membrane bound isoforms.

[0067] The term “YL ACBP” refers to the Yarrowia lipolytica gene encoding an acyl CoA binding protein (ORF YALI0E23185g within the public Y. lipolytica protein database of the “Yeast project Genolevures” (Center for Bioinformatics, LaBR1, Talence Cedex, France; see also Dujon, B. et al., Nature, 430(6995):35-44 (2004)). The nucleotide sequence of YL ACBP is set forth as SEQ ID NO:1, while the YL ACBP protein is provided as SEQ ID NO:2 herein.

[0068] The term “DAG AT” refers to a diacylglycerol acyltransferase (also known as an acyl-CoA-diacylglycerol acyltransferase or a diacylglycerol O-acyltransferase) (EC 2.3.1.20). This enzyme is responsible for the conversion of acyl-CoA and 1,2-diacylglycerol to TAG and CoA, thereby involved in the terminal step of TAG biosynthesis. Two families of DAG AT enzymes exist: DGAT1 and DGAT2. The former family shares homology with the acyl-CoA:cholesterol acyltransferase [“ACAT”] gene family, while the latter family is unrelated (Lardizabal et al., J. Biol. Chem. 276(42):38862-28869 (2001)).

[0069] A metabolic pathway, or biosynthetic pathway, in a biochemical sense, can be regarded as a series of chemical reactions occurring within a cell, catalyzed by enzymes, to achieve either the formation of a metabolic product to be used or stored by the cell, or the initiation of another metabolic pathway (then called a flux generating step). Many of these pathways are elaborate, and involve a step by step modification of the initial substance to shape it into a product having the exact chemical structure desired.

[0070] The term “PUFA biosynthetic pathway” refers to a metabolic process that converts oleic acid to ω-6 fatty acids such as LA, EDA, GLA, DGLA, ARA, DRA, DTA and DPAn-6 and ω-3 fatty acids such as ALA, STA, ETrA, ETA, EPA, DPA and DHA. This process is well described in the literature (e.g., see U.S. Pat. Pub. No. 2006-0115881-A1). Briefly, this process involves elongation of the carbon chain through the addition of carbon atoms and desaturation of the molecule through the addition of double bonds, via a series of special desaturation and elongation enzymes termed “PUFA biosynthetic pathway enzymes” that are present in the endoplasmic reticulim membrane. More specifically, “PUFA biosynthetic pathway enzyme” refers to any of the following enzymes (and genes which encode said enzymes) associated with the biosynthesis of a PUFA, including: Δ9 elongase, C_{14/16} elongase, C_{16/18} elongase, C_{18/20} elongase, C_{20/22} elongase, Δ4 desaturase, Δ5 desaturase, Δ6 desaturase, Δ12 desaturase, Δ15 desaturase, Δ17 desaturase, Δ9 desaturase and/or Δ8 desaturase.

[0071] The term “functional” as used herein relating to the PUFA biosynthetic pathway, for synthesis of ω-3/ω-6 fatty acids, means that some (or all) of the genes in the pathway express active enzymes, resulting in in vivo catalysis or substrate conversion. It should be understood that “ω-3/ω-6 fatty acid biosynthetic pathway” or “functional ω-3/ω-6 fatty acid biosynthetic pathway” does not imply that all of the PUFA biosynthetic pathway genes in the above paragraph are required, as a number of fatty acid products will require only the expression of a subset of the genes of this pathway.

[0072] The term “desaturase” refers to a polypeptide that can desaturate, i.e., introduce a double bond, in one or more fatty acids to produce a fatty acid or precursor of interest. Despite use of the omega-reference system throughout the specification to refer to specific fatty acids, it is more convenient to indicate the activity of a desaturase by counting from the carboxyl end of the substrate using the delta-system. Of particular interest herein are Δ6 desaturases, Δ8 desaturases, Δ5 desaturases, Δ4 desaturases, Δ12 desaturases, Δ15 desaturases, Δ17 desaturases and Δ9 desaturases. In the art, Δ15 and Δ17 desaturases are also occasionally referred to as “omega-3 desaturases”, “ω-3 desaturases” and/or “ω-3 desaturases”, based on their ability to convert ω-6 fatty acids into their ω-3 counterparts.

[0073] The term “elongase” refers to a polypeptide that can elongate a fatty acid carbon chain to produce an acid that is 2 carbons longer than the fatty acid substrate that the elongase acts upon. This process of elongation occurs in a multi-step mechanism in association with fatty acid synthase, as described in U.S. Patent Publication No. 2005/0132442. Examples of reactions catalyzed by elongase systems are the conversion of GLA to DGLA, STA to ETA, LA to EDA, ALA to ETrA, ARA to DTA and EPA to DPA. In general, the substrate selectivity of elongases is somewhat broad but segregated by both chain length and the degree of unsaturation. For example, a C_{14/16} elongase will utilize a C₁₄ substrate (e.g., myristic acid), a C_{16/18} elongase will utilize a C₁₆ substrate (e.g., palmitate), a C_{18/20} elongase (also known as a Δ6 elongase as the terms can be used interchangeably) will utilize a C₁₈ substrate (e.g., GLA, STA) and a C_{20/22} elongase will utilize a C₂₀ substrate (e.g., ARA, EPA). In like manner, a Δ9 elongase catalyzes the conversion of LA to EDA and/or ALA to ETrA.

[0074] The terms “conversion efficiency” and “percent substrate conversion” refer to the efficiency by which a particular enzyme (e.g., a desaturase) can convert substrate to product. The conversion efficiency is measured according to the following formula: ([product]/[substrate+product])*100, where ‘product’ includes the immediate product and all products in the pathway derived from it.

[0075] The term “disruption”, in or in connection with a native ACBP, refers to down-regulation, either partial or total, of a gene encoding ACBP which can result in altering the activity of ACBP. For example, disruption includes, but is not limited to, an insertion, deletion, or targeted mutation within a portion of that gene, that results in either a complete gene knockout such that the gene is deleted from the genome and no protein is translated or a translated ACBP having an insertion, deletion, amino acid substitution or other targeted mutation. The location of the disruption in the protein may be, for example, within the N-terminal portion of the protein or within the C-terminal portion of the protein. The disrupted ACBP will have altered activity with respect to the ACBP that was not disrupted. The alteration in activity can be a decrease in activity whereby the ACBP has some level of activity up to and including losing activity altogether, i.e., the ACBP has no detectable level of activity (it appears to be non-functional. A disruption in a native gene encoding an ACBP also includes alternate means that result in low or lack of expression of the ACBP, such as could result via manipulating the regulatory sequences, transcription and translation factors and/or signal transduction pathways or by use of sense, antisense or RNAi technology, etc.

[0076] The terms “polynucleotide”, “polynucleotide sequence”, “nucleic acid sequence”, “nucleic acid fragment” and “isolated nucleic acid fragment” are used interchangeably herein. These terms encompass nucleotide sequences and the like. A polynucleotide may be a polymer of RNA or DNA that is single- or double-stranded, that optionally contains synthetic, non-natural or altered nucleotide bases. A polynucleotide in the form of a polymer of DNA may be comprised of one or more segments of cDNA, genomic DNA, synthetic DNA, or mixtures thereof. Nucleotides (usually found in their 5′-monophosphate form) are referred to by a single letter designation as follows: “A” for adenylate or deoxyadenylate (for RNA or DNA, respectively), “C” for cytidylate or deoxycytidylate, “G” for guanylate or deoxyguanylate, “U” for uridylate, “T” for deoxythymidylate, “R” for purines (A or G), “Y” for pyrimidines (C or T), “K” for G or T, “H” for A or C or T, “I” for inosine, and “N” for any nucleotide.

[0077] A “substantial portion” of an amino acid or nucleotide sequence is that portion comprising enough of the amino acid sequence of a polypeptide or the nucleotide sequence of a gene to putatively identify that polypeptide or gene, either by manual evaluation of the sequence by one skilled in the art, or by computer-automated sequence comparison and identification using algorithms such as BLAST (Basic Local Alignment Search Tool; Altschul, S. F., et al., J. Mol. Biol., 215:403-410 (1993)). In general, a sequence of ten or more contiguous amino acids or thirty or more nucleotides is necessary in order to identify putatively a polypeptide or nucleic acid sequence as homologous to a known protein or gene. Moreover, with respect to nucleotide sequences, gene-specific oligonucleotide probes comprising 20-30 contiguous nucleotides may be used in sequence-dependent methods of gene identification (e.g., Southern hybridization) and isolation, such as in situ hybridization of bacterial colonies or bacteriophage plaques. In addition, short oligonucleotides of 12-15 bases may be used as amplification primers in PCR in order to obtain a particular nucleic acid fragment comprising the primers. Accordingly, a “substantial portion” of a nucleotide sequence comprises enough of the sequence to specifically identify and/or isolate a nucleic acid fragment comprising the sequence.

[0078] The term “conserved domain” or “motif” means a set of amino acids conserved at specific positions along an aligned sequence of evolutionarily related proteins. While amino acids at other positions can vary between homologous proteins, amino acids that are highly conserved at specific positions indicate amino acids that are essential in the structure, the stability, or the activity of a protein. Because they are identified by their high degree of conservation in aligned sequences of a family of protein homologues, they can be used as identifiers, or “signatures”, to determine if a protein with a newly determined sequence belongs to a previously identified protein family. Motifs that are found in most ACBPs include Leu-Xaa-Xaa-Tyr-Xaa-Xaa-(Tyr/Phe)-Lys (LxxYxx[Y/F]K; SEQ ID NO:36), Lys-Xaa-Xaa-Ala-Trp (KxxAW; SEQ ID NO:37) and Ala-Xaa-Xaa-Xaa-Tyr (AxxxY; SEQ ID NO:38).

[0079] The terms “homology”, “homologous”, “substantially similar” and “corresponding substantially” are used interchangeably herein. They refer to nucleic acid fragments wherein changes in one or more nucleotide bases do not affect the ability of the nucleic acid fragment to mediate gene expression or produce a certain phenotype. These terms also refer to modifications of the nucleic acid fragments such as deletion or insertion of one or more nucleotides that do not substantially alter the functional properties of the resulting nucleic acid fragment relative to the initial, unmodified fragment.

[0080] Moreover, the skilled artisan recognizes that substantially similar nucleic acid sequences are also defined by their ability to hybridize (under moderately stringent conditions, e.g., 0.5×SSC, 0.1% SDS, 60° C.) with the ACBP sequences described herein, or to any portion of the nucleotide sequences disclosed herein and which are functionally equivalent to any of the nucleic acid sequences disclosed herein. Stringency conditions can be adjusted to screen for moderately similar fragments, such as homologous sequences from distantly related organisms, to highly similar fragments, such as genes that duplicate functional enzymes from closely related organisms. Post-hybridization washes determine stringency conditions. An extensive guide to the hybridization of nucleic acids is found in Tijssen, Laboratory Techniques in Biochemistry and Molecular Biology—Hybridization with Nucleic Acid Probes, Part I, Chapter 2 “Overview of principles of hybridization and the strategy of nucleic acid probe assays”, Elsevier, New York (1993); and Current Protocols in Molecular Biology, Chapter 2, Ausubel et al., Eds., Greene Publishing and Wiley-Interscience, New York (1995).

[0081] As used herein, the term “percent identity” refers to a relationship between two or more polypeptide sequences or two or more polynucleotide sequences, as determined by comparing the sequences. “Identity” also means the degree of sequence relatedness between polypeptide or polynucleotide sequences, as the case may be, as determined by the percentage of match between compared sequences. “Percent identity” and “percent similarity” can be readily calculated by known methods, including but not limited to those described in: 1) Computational Molecular Biology (Lesk, A. M., Ed.) Oxford University: NY (1988); 2) Biocomputing: Informatics and Genome Projects (Smith, D. W., Ed.) Academic: NY (1993); 3) Computer Analysis of Sequence Data, Part I (Griffin, A. M., and Griffin, H. G., Eds.) Humania: NJ (1994); 4) Sequence Analysis in Molecular Biology (von Heinje, G., Ed.) Academic (1987); and, 5) Sequence Analysis Primer (Gribskov, M. and Devereux, J., Eds.) Stockton: NY (1991).

[0082] Preferred methods to determine percent identity are designed to give the best match between the sequences tested. Methods to determine percent identity and percent similarity are codified in publicly available computer programs. Sequence alignments and percent identity calculations may be performed using the MegAlign™ program of the LASERGENE bioinformatics computing suite (DNASTAR Inc., Madison, Wis.). Multiple alignment of the sequences is performed using the “Clustal method of alignment” which encompasses several varieties of the algorithm including the “Clustal V method of alignment” and the “Clustal W method of alignment” (described by Higgins and Sharp, CABIOS, 5:151-153 (1989); Higgins, D. G. et al., Comput. Appl. Biosci., 8:189-191 (1992)) and found in the MegAlign™ v6.1 program of the LASERGENE bioinformatics computing suite (DNASTAR Inc.). After alignment of the sequences using either Clustal program, it is possible to obtain a “percent identity” by viewing the “sequence distances” table in the program.

[0083] It is well understood by one skilled in the art that many levels of sequence identity are useful in identifying polypeptides, from other species, wherein such polypeptides have the same or similar function or activity. Useful examples of percent identities include any integer percentage from 50% to 100%, such as 51%, 52%, 53%, 54%, 55%, 56%, 57%, 58%, 59%, 60%, 61%, 62%, 63%, 64%, 65%, 66%, 67%, 68%, 69%, 70%, 71%, 72%, 73%, 74%, 75%, 76%, 77%, 78%, 79%, 80%, 81%, 82%, 83%, 84%, 85%, 86%, 87%, 88%, 89%, 90%, 91%, 92%, 93%, 94%, 95%, 96%, 97%, 98% or 99%. Also, of interest is any full-length or partial complement of this isolated nucleotide fragment.

[0084] “Codon degeneracy” refers to the nature in the genetic code permitting variation of the nucleotide sequence without effecting the amino acid sequence of an encoded polypeptide. The skilled artisan is well aware of the “codon-bias” exhibited by a specific host cell in usage of nucleotide codons to specify a given amino acid. Therefore, when synthesizing a gene for improved expression in a host cell, it is desirable to design the gene such that its frequency of codon usage approaches the frequency of preferred codon usage of the host cell.

[0085] “Synthetic genes” can be assembled from oligonucleotide building blocks that are chemically synthesized using procedures known to those skilled in the art. These building blocks are ligated and annealed to form gene segments that are then enzymatically assembled to construct the entire gene. Accordingly, the genes can be tailored for optimal gene expression based on optimization of nucleotide sequence to reflect the codon bias of the host cell. The skilled artisan appreciates the likelihood of successful gene expression if codon usage is biased towards those codons favored by the host. Determination of preferred codons can be based on a survey of genes derived from the host cell, where sequence information is available.

[0086] “Gene” refers to a nucleic acid fragment that expresses a specific protein, and that may refer to the coding region alone or may include regulatory sequences preceding (5′ non-coding sequences) and following (3′ non-coding sequences) the coding sequence. “Native gene” refers to a gene as found in nature with its own regulatory sequences. “Chimeric gene” refers to any gene that is not a native gene, comprising regulatory and coding sequences that are not found together in nature. Accordingly, a chimeric gene may comprise regulatory sequences and coding sequences that are derived from different sources, or regulatory sequences and coding sequences derived from the same source, but arranged in a manner different than that found in nature. “Endogenous gene” refers to a native gene in its natural location in the genome of an organism. A “foreign” gene refers to a gene not normally found in the host organism, but that is introduced into the host organism by gene transfer. Foreign genes can comprise native genes inserted into a non-native organism, or chimeric genes. A “transgene” is a gene that has been introduced into the genome by a transformation procedure. A “codon-optimized gene” is a gene having its frequency of codon usage designed to mimic the frequency of preferred codon usage of the host cell.

[0087] “Coding sequence” refers to a DNA sequence that codes for a specific amino acid sequence. “Regulatory sequences” refer to nucleotide sequences located upstream (5′ non-coding sequences), within, or downstream (3′ non-coding sequences) of a coding sequence, and which influence the transcription, RNA processing or stability, or translation of the associated coding sequence. Regulatory sequences may include promoters, enhancers, silencers; 5′ untranslated leader sequence (e.g., between the transcription start site and the translation initiation codon), introns, polyadenylation recognition sequences, RNA processing sites, effector binding sites and stem-loop structures.

[0088] “Promoter” refers to a DNA sequence capable of controlling the expression of a coding sequence or functional RNA. In general, a coding sequence is located 3′ to a promoter sequence. Promoters may be derived in their entirety from a native gene, or be composed of different elements derived from different promoters found in nature, or even comprise synthetic DNA segments. It is understood by those skilled in the art that different promoters may direct the expression of a gene in different tissues or cell types, or at different stages of development, or in response to different environmental conditions. Promoters that cause a gene to be expressed in most cell types at most times are commonly referred to as “constitutive promoters”. It is further recognized that since in most cases the exact boundaries of regulatory sequences have not been completely defined, DNA fragments of different lengths may have identical promoter activity.

[0089] The terms “3′ non-coding sequence” and “transcription terminator” refer to DNA sequences located downstream of a coding sequence. This includes polyadenylation recognition sequences and other sequences encoding regulatory signals capable of affecting mRNA processing or gene expression. The polyadenylation signal is usually characterized by affecting the addition of polyadenylic acid tracts to the 3′ end of the mRNA precursor. The 3′ region can influence the transcription, RNA processing or stability, or translation of the associated coding sequence.

[0090] “RNA transcript” refers to the product resulting from RNA polymerase-catalyzed transcription of a DNA sequence. When the RNA transcript is a perfect complementary copy of the DNA sequence, it is referred to as the primary transcript. A RNA transcript is referred to as the mature RNA when it is a RNA sequence derived from post-transcriptional processing of the primary transcript. “Messenger RNA” or “mRNA” refers to the RNA that is without introns and that can be translated into protein by the cell. “cDNA” refers to a DNA that is complementary to, and synthesized from, a mRNA template using the enzyme reverse transcriptase. The cDNA can be single-stranded or converted into double-stranded form using the Klenow fragment of DNA polymerase I.

[0091] The term “operably linked” refers to the association of nucleic acid sequences on a single nucleic acid fragment so that the function of one is affected by the other. For example, a promoter is operably linked with a coding sequence when it is capable of affecting the expression of that coding sequence. That is, the coding sequence is under the transcriptional control of the promoter. Coding sequences can be operably linked to regulatory sequences in a sense or antisense orientation.

[0092] The term “recombinant” refers to an artificial combination of two otherwise separated segments of sequence, e.g., by chemical synthesis or by the manipulation of isolated segments of nucleic acids by genetic engineering techniques.

[0093] The term “expression”, as used herein, refers to the transcription and stable accumulation of sense (mRNA) or antisense RNA derived from the nucleic acid fragments. Expression may also refer to translation of mRNA into a protein (either precursor or mature).

[0094] The terms “plasmid” and “vector” refer to an extra chromosomal element often carrying genes that are not part of the central metabolism of the cell, and usually in the form of circular double-stranded DNA fragments. Such elements may be autonomously replicating sequences, genome integrating sequences, phage or nucleotide sequences, linear or circular, of a single- or double-stranded DNA or RNA, derived from any source, in which a number of nucleotide sequences have been joined or recombined into a unique construction which is capable of introducing an expression cassette(s) into a cell.

[0095] The term “expression cassette” refers to a fragment of DNA comprising the coding sequence of a selected gene and regulatory sequences preceding (5′ non-coding sequences) and following (3′ non-coding sequences) the coding sequence that are required for expression of the selected gene product. Thus, an expression cassette is typically composed of: 1) a promoter sequence; 2) a coding sequence (i.e., ORF); and, 3) a 3′ untranslated region (i.e., a terminator) that, in eukaryotes, usually contains a polyadenylation site. The expression cassette(s) is usually included within a vector, to facilitate cloning and transformation. Different expression cassettes can be transformed into different organisms including bacteria, yeast, plants and mammalian cells, as long as the correct regulatory sequences are used for each host.

[0096] “Transformation” refers to the transfer of a nucleic acid molecule into a host organism, resulting in genetically stable inheritance. The nucleic acid molecule may be a plasmid that replicates autonomously, for example, or, it may integrate into the genome of the host organism. Host organisms containing the transformed nucleic acid fragments are referred to as “transgenic” or “recombinant” or “transformed” organisms.

[0097] Standard recombinant DNA and molecular cloning techniques used herein are well known in the art and are described more fully in Sambrook, J., Fritsch, E. F. and Maniatis, T. Molecular Cloning: A Laboratory Manual; Cold Spring Harbor Laboratory: Cold Spring Harbor, N.Y. (1989); by Silhavy, T. J., Bennan, M. L. and Enquist, L. W., Experiments with Gene Fusions, Cold Spring Harbor Laboratory: Cold Spring Harbor, N.Y. (1984); and by Ausubel, F. M. et al., Current Protocols in Molecular Biology, published by Greene Publishing Assoc. and Wiley-Interscience, Hoboken, N.J. (1987). Transformation methods are well known to those skilled in the art and are described infra.

[0098] TAGs (the primary storage unit for fatty acids) are formed by a series of reactions that involve: 1) the esterification of one molecule of acyl-CoA to glycerol-3-phosphate via an acyltransferase to produce lysophosphatidic acid; 2) the esterification of a second molecule of acyl-CoA via an acyltransferase to yield 1,2-diacylglycerol phosphate (commonly identified as phosphatidic acid); 3) removal of a phosphate by phosphatidic acid phosphatase to yield 1,2-diacylglycerol [“DAG”]; and, 4) the addition of a third fatty acid by the action of a DAG AT (e.g., PDAT, DGAT1 or DGAT2) to form TAG.

[0099] A wide spectrum of fatty acids can be incorporated into TAGs, including saturated and unsaturated fatty acids and short-chain and long-chain fatty acids. Preferably, incorporation of “long-chain” PUFAs into TAG is most desirable, wherein long-chain PUFAs include any fatty acid derived from an 18:1 substrate having at least 18 carbons in length (i.e., C₁₈ or greater). This also includes hydroxylated fatty acids, epoxy fatty acids and conjugated linoleic acid.

[0100] Although most PUFAs are incorporated into TAGs as neutral lipids and are stored in lipid bodies, it is important to note that a measurement of the total lipids (or total fatty acid content) within an oleaginous organism should include those lipids that are located in the phosphatidylcholine [“PC”] fraction, phosphatidyletanolamine [“PE”] fraction, and triacylglycerol [“TAG”] fraction.

[0101] The metabolic process wherein oleic acid is converted to ω-3/ω-6 fatty acids involves elongation of the carbon chain through the addition of carbon atoms and desaturation of the molecule through the addition of double bonds. This requires a series of special desaturation and elongation enzymes present in the endoplasmic reticulim membrane. However, as seen in FIG. 1 and as described below, there are often multiple alternate pathways for production of a specific ω-3/ω-6 fatty acid.

[0102] These pathways start with the conversion of oleic acid to LA, the first of the ω-6 fatty acids, by a Δ12 desaturase. Then, using the “Δ6 desaturase/Δ6 elongase pathway” and linoleic acid [“LA”] as substrate, long chain ω-6 fatty acids are formed as follows: 1) LA is converted to γ-linolenic acid [“GLA”] by a Δ6 desaturase; 2) GLA is converted to dihomo-γ-linolenic acid [“DGLA”] by a C_{18/20} elongase; 3) DGLA is converted to arachidonic acid [“ARA”] by a A5 desaturase; 4) ARA is converted to docosatetraenoic acid [“DTA”] by a C_{20/22} elongase; and, 5) DTA is converted to docosapentaenoic acid [“DPAn-6”] by a Δ4 desaturase. Alternatively, the “Δ6 desaturase/Δ6 elongase” can use α-linolenic acid [“ALA”] as substrate to produce long chain ω-3 fatty acids as follows: 1) LA is converted to ALA, the first of the ω-3 fatty acids, by a Δ15 desaturase; 2) ALA is converted to stearidonic acid [“STA”] by a A6 desaturase; 3) STA is converted to eicosatetraenoic acid [“ETA”] by a C_{18/20} elongase; 4) ETA is converted to eicosapentaenoic acid [“EPA”] by a Δ5 desaturase; 5) EPA is converted to docosapentaenoic acid [“DPA”]by a C_{20/22} elongase; and, 6) DPA is converted to docosahexaenoic acid [“DHA”] by a Δ4 desaturase. Optionally, ω-6 fatty acids may be converted to ω-3 fatty acids; for example, ETA and EPA are produced from DGLA and ARA, respectively, by Δ17 desaturase activity.

[0103] Alternate pathways for the biosynthesis of ω-3/ω-6 fatty acids utilize a Δ9 elongase and Δ8 desaturase (i.e., the “Δ9 elongase/Δ8 desaturase pathway”). More specifically, LA and ALA may be converted to eicosadienoic acid [“EDA”] and eicosatrienoic acid [“ETrA”], respectively, by a Δ9 elongase; then, a Δ8 desaturase converts EDA to DGLA and/or ETrA to ETA. Downstream PUFAs are subsequently formed as described above.

[0104] It is contemplated that the particular functionalities required to be introduced into a specific host organism for production of ω-3/ω-6 fatty acids will depend on the host cell (and its native PUFA profile and/or desaturase/elongase profile), the availability of substrate, and the desired end product(s). For example, expression of the Δ6 desaturase/Δ6 elongase pathway may be preferred in some embodiments, as opposed to expression of the Δ9 elongase/Δ8 desaturase pathway, since PUFAs produced via the former pathway are not devoid of GLA and/or STA.

[0105] As previously defined, ACBP selectively binds medium and long chain acyl-CoA esters with high specificity and affinity and efficiently protects acyl-CoA esters from hydrolysis by thioesterases. In vitro studies indicate that ACBP may regulate the availability of acyl-CoA esters in intermediary lipid metabolism.

[0106] In yeast, ACBP is involved in fatty acid chain elongation, sphingolipid biosynthesis, protein sorting, and vesicular trafficking. More specifically, previous studies have determined that overexpression of ACBP in the yeast Saccharomyces cerevisiae significantly increases the acyl-CoA pool size, indicating that ACBP can generate an intracellular acyl-CoA pool (Mandrup, S., et al., Biochem. J., 290:369-374 (1993); Knudsen, J., et al., Biochem J., 302(2):479-485 (1994)). Similarly, disruption of ACBP in S. cerevisiae has been found to perturb acyl-CoA metabolism (Schjerling, C. K., et al., J. Biol. Chem., 271:22514-22521 (1996)) and modify composition of long-chain acyl-CoA (Gaigg, B., et al., Mol. Biol. Cell, 12:1147-1160 (2001))). Most recently, in the review by Schroeder, F., et al. (Lipids, 43:1-17 (2008)), it is noted that ACBP may also selectively cooperate with a nuclear receptor (i.e., HNF4α), to provide a signaling pathway for long-chain fatty acid metabolism. ACBP enhances the uptake of lipidic ligands (i.e., long-chain fatty acid CoAs), binds these ligands with high affinity in the cytoplasm, cotransports this cargo to nuclei and through the nuclear pores into the nucleoplasm, forms complexes with nuclear receptors exhibiting even higher affinity for the respective ligands, and directly channels this cargo to the respective nuclear receptors to regulate receptor activation. Thus, ACBP is suggested to act as nutrient sensor and in part regulate its own expression. To date, no one has studied the effect of ACBP disruption or overexpression in an oleaginous organism, such as those engineered for high-level production of PUFAs.

[0107] In one embodiment, the instant invention concerns an oleaginous microbial organism, comprising:
[0108] i) a recombinant construct comprising at least one isolated polynucleotide comprising a nucleic acid sequence encoding an acyl-CoA binding protein operably linked to at least one regulatory sequence; and
[0109] ii) a source of fatty acids.

[0110] In a second embodiment, the instant invention concerns an oleaginous microbial organism, comprising:
[0111] i) a disruption in a native gene encoding an acyl-CoA binding protein; and
[0112] ii) a source of fatty acids.

[0113] Sources of the oleaginous microbial organism can be selected from the group consisting of Yarrowia, Candida, Rhodotorula, Rhodosporidium, Cryptococcus, Trichosporon and Lipomyces.

[0114] In another aspect, the oleaginous microbial organism of the invention can comprise a recombinant construct having at least one nucleic acid sequence encoding a diacylglycerol acyltransferase selected from the group consisting of DGAT1, DGAT2 and DGAT1 in combination with DGAT2.

[0115] Numerous techniques are available to one of skill in the art for disrupting expression of an oleaginous microbial organism's native ACBP.

[0116] Generally the expression of a gene can be reduced or eliminated (i.e., “knocked out”) by, for example: 1) disrupting the gene expression through insertion, substitution and/or deletion of all or part of the target gene; 2) using antisense or iRNA technology; 3) using a host cell which naturally has [or has been mutated to have] little or none of the specific gene's activity; 4) over-expressing a mutagenized heterosubunit (i.e., in an enzyme that comprises two or more heterosubunits) to thereby reduce the enzyme's activity as a result of the “dominant negative effect”; and 5) manipulating the regulatory sequences controlling the expression of the protein.

[0117] Each of these techniques are briefly described in WO 2006/052912, the disclosure of which is hereby incorporated by reference.

[0118] In preferred embodiments, a foreign DNA fragment (typically a selectable marker gene) is inserted into the structural gene to be disrupted (i.e., ACBP) in order to interrupt its coding sequence and thereby functionally inactivate the gene. Transformation of the disruption cassette into the host cell results in replacement of the functional native gene by homologous recombination with the non-functional disrupted gene (see, for example: Hamilton et al., J. Bacteriol., 171:4617-4622 (1989); Balbas et al., Gene, 136:211-213 (1993); Gueldener et al., Nucleic Acids Res., 24:2519-2524 (1996); and Smith et al., Methods Mol. Cell. Biol., 5:270-277 (1996)). One skilled in the art will be familiar with the many techniques available for targeting a gene, thereby permitting positive or negative selection, creation of gene knockouts, and insertion of exogenous DNA sequences into specific genome sites in mammalian systems, plant cells, filamentous fungi, and/or microbial systems.

[0119] In alternate embodiments, the regulatory sequences associated with an ACBP coding sequence (e.g., promoters, translation leader sequences, introns, enhancers, initiation control regions, polyadenylation recognition sequences, RNA processing sites, effector binding sites and stem-loop structures) could be manipulated to result in diminished expression of the ACBP. For example, the ACBP promoter could be deleted or disrupted; or the native promoter driving expression of ACBP could be substituted with a heterologous promoter having diminished promoter activity with respect to the native promoter. Methods useful for manipulating regulatory sequences are well known to those skilled in the art.

[0120] An ACBP comprising the amino acid sequence set forth in SEQ ID NO:2 is disclosed herein, although variants and/or functional equivalents thereof are also envisioned to be suitable. Specifically, based on the substantial sequence conservation within ACBP proteins, it is well within the means of one of skill in the art to easily identify homologous proteins in other species and even novel proteins having essentially the same affinity for CoA esters of hydrophobic acids. All of these proteins and their functional variants are useful in the methods described below.

[0121] For example, Burton, M. et al. (Biochem. J., 392:299-307 (2005)) provides excellent sequence comparisons of ACBPs from vertebrates, urochordates, echinoderms, arthropods, nematodes and other lower metazoans, fungal and plant species, including e.g., GenBank Accession Nos., BI191959, BU065460, EM53049, EAA33144m BE776849, CD051645, CD044063, AAB31936, NC_{—}001139, AAC101000271, AABZ01000388, CAA69946, MBY01000137, Y08690, NP_{—}596820, CAE74488, CAE70798, CAE69296, NP_{—}491412, NP_{—}509822, NP_{—}498609 and NP_{—}496552. Based on the alignments therein, ACBP motifs are readily identified for use in the identification of homologous proteins in other species. A preferred set of motifs would include the following: Leu-Xaa-Xaa-Tyr-Xaa-Xaa-(Tyr/Phe)-Lys (LxxYxx[Y/F]K; SEQ ID NO:36), Lys-Xaa-Xaa-Ala-Trp (KxxAW; SEQ ID NO:37) and Ala-Xaa-Xaa-Xaa-Tyr (AxxxY; SEQ ID NO:38).

[0122] In another embodiment, a method for modifying total lipid content in an oleaginous microbial organism is provided herein, comprising:
[0123] a) providing an oleaginous microbial organism, comprising:
   [0124] (i) a recombinant construct comprising at least one isolated polynucleotide comprising a nucleic acid sequence encoding an acyl-CoA binding protein operably linked to at least one regulatory sequence; and
   [0125] (ii) a source of fatty acids;
[0126] b) growing the cell of step (a) under conditions whereby transfer of the fatty acids to lipid fractions of the organism is altered by altering expression of the isolated polynucleotide comprising a nucleic acid sequence encoding an acyl-CoA binding protein; and
[0127] c) optionally recovering the total lipid fractions of step (b).

[0128] This method permits expression of the at least one isolated polynucleotide comprising a nucleic acid sequence encoding an ACBP to either be decreased (thereby resulting in decreased total lipid content in the oleaginous microbial organism) or increased (thereby resulting in increased total lipid content in the oleaginous microbial organism).

[0129] Furthermore, a method for modifying fatty acid composition in an oleaginous microbial organism is provided, comprising:
[0130] (a) providing an oleaginous microbial organism, comprising:
[0131] (i) a recombinant construct comprising at least one isolated polynucleotide comprising a nucleic acid sequence encoding an acyl-CoA binding protein operably linked to at least one regulatory sequence; and
[0132] (ii) a functional ω-3/ω-6 fatty acid biosynthetic pathway comprising at least one isolated polynucleotide comprising a nucleic acid sequence encoding a desaturase enzyme for biosynthesis of fatty acids;
[0133] (b) growing the cell of step (a) under conditions whereby the expression of the acyl-CoA binding protein is altered, resulting in an altered rate of desaturation by the at least one desaturase enzyme and an altered transfer of the synthesized fatty acids to lipid fractions of the organism;
[0134] (c) optionally recovering the lipid fractions of step (b); and,
[0135] (d) optionally determining the modified fatty acid composition of the lipid fractions of step (c).

[0136] Again, this method permits the expression of the at least one isolated polynucleotide comprising a nucleic acid sequence encoding an ACBP to either be decreased or increased. When the expression is decreased, there is an increased rate of desaturation, thereby causing increased production of PUFAs as a percent of the total fatty acids, and a decrease in total lipid content in the oleaginous microbial organism. In contrast, when the expression of ACBP is increased, a decreased rate of desaturation results, thereby causing decreased production of PUFAs as a percent of the total fatty acids, and an increase in total lipid content in the oleaginous microbial organism.

[0137] It is believed that by down-regulating activity of ACBP, the substrate competition between oil biosynthesis and polyunsaturation is reduced in favor of polyunsaturation during oleaginy; thus, in effect, when the activity of ACBP is diminished or knocked out, polyunsaturation is permitted to occur more efficiently.

[0138] Furthermore, the results achieved by manipulation of ACBP may be enhanced when a DAG AT (i.e., DGAT1, DGAT2) enzyme is similarly manipulated.

[0139] Microbial expression systems and expression vectors containing regulatory sequences that direct high level expression of foreign proteins (i.e., ACBP) are well known to those skilled in the art. Any of these could be used to construct chimeric ACBP genes that could then be introduced into appropriate oleaginous microorganisms via transformation to provide high-level expression of the encoded ACBP enzyme.

[0140] Vectors (e.g., constructs, plasmids) and DNA expression cassettes useful for the transformation of suitable microbial host cells are well known in the art. The specific choice of sequences present in the construct is dependent upon the desired expression products (supra), the nature of the host cell and the proposed means of separating transformed cells versus non-transformed cells. Typically, however, the vector contains at least one expression cassette, a selectable marker and sequences allowing autonomous replication or chromosomal integration. Suitable expression cassettes comprise a region 5′ of the gene that controls transcription (e.g., a promoter), the gene coding sequence, and a region 3′ of the DNA fragment that controls transcriptional termination (i.e., a terminator). It is most preferred when both control regions are derived from genes from the transformed microbial host cell, although it is to be understood that such control regions need not be derived from the genes native to the specific species chosen as a production host.

[0141] Transcriptional control regions (also initiation control regions or promoters) which are useful to drive expression of the ACBP ORFs in the desired microbial host cell are numerous and familiar to those skilled in the art. Virtually any promoter (i.e., native, synthetic, or chimeric) capable of directing expression of these genes in the selected host cell is suitable, although transcriptional and translational regions from the host species are particularly useful. Expression in a microbial host cell can be accomplished in an induced or constitutive fashion. Induced expression can be accomplished by inducing the activity of a regulatable promoter operably linked to the gene of interest, while constitutive expression can be achieved by the use of a constitutive promoter operably linked to the gene of interest. As an example, when the host cell is yeast, transcriptional and translational regions functional in yeast cells are provided, particularly from the host species (e.g., see Patent Publication No. US-2006-0115881-A1, corresponding to PCT Publication No. WO 2006/052870 for preferred transcriptional initiation regulatory regions for use in Yarrowia lipolytica). Any one of a number of regulatory sequences can be used, depending upon whether constitutive or induced transcription is desired, the efficiency of the promoter in expressing the ORF of interest, the ease of construction and the like.

[0142] The termination region can be derived from the 3′ region of the gene from which the initiation region was obtained or from a different gene. A large number of termination regions are known and function satisfactorily in a variety of hosts (when utilized both in the same and different genera and species from where they were derived). The termination region usually is selected more as a matter of convenience rather than because of any particular property. Termination control regions may also be derived from various genes native to the preferred hosts. In alternate embodiments, the 3′-region can also be synthetic, as one of skill in the art can utilize available information to design and synthesize a 3′-region sequence that functions as a transcription terminator. A termination region may be unnecessary, but it is highly preferred.

[0143] As one of skill in the art is aware, merely inserting an isolated polynucleotide into a cloning vector does not ensure that it will be successfully expressed at the level needed. In response to the need for a high expression rate, many specialized expression vectors have been created by manipulating a number of different genetic elements that control aspects of transcription, translation, protein stability, oxygen limitation and secretion from the microbial host cell. More specifically, some of the molecular features that have been manipulated to control gene expression include: the nature of the relevant transcriptional promoter and terminator sequences; the number of copies of the cloned gene (wherein additional copies may be cloned within a single expression construct and/or additional copies may be introduced into the host cell by increasing the plasmid copy number or by multiple integration of the cloned gene into the genome); whether the gene is plasmid-borne or integrated into the genome of the host cell; the final cellular location of the synthesized foreign protein; the efficiency of translation and correct folding of the protein in the host organism; the intrinsic stability of the mRNA and protein of the cloned gene within the host cell; and, the codon usage within the cloned gene, such that its frequency approaches the frequency of preferred codon usage of the host cell. Each of these types of modifications are encompassed in the present disclosure, as means to further optimize expression of ACBP.

[0144] Once a DNA cassette that is suitable for expression in an appropriate microbial host cell has been obtained (e.g., a chimeric gene comprising a promoter, ORF and terminator or a gene knock-out construct), it is placed in a plasmid vector capable of autonomous replication in a host cell, or it is directly integrated into the genome of the host cell. Integration of expression cassettes can occur randomly within the host genome or can be targeted through the use of constructs containing regions of homology with the host genome sufficient to target recombination within the host locus. Where constructs are targeted to an endogenous locus, all or some of the transcriptional and translational regulatory regions can be provided by the endogenous locus.

[0145] Where two or more isolated polynucleotides are expressed from separate replicating vectors, it is desirable that each vector has a different means of selection and should lack homology to the other construct(s) to maintain stable expression and prevent reassortment of elements among constructs. Judicious choice of regulatory regions, selection means and method of propagation of the introduced construct(s) can be experimentally determined so that all introduced genes are expressed at the necessary levels to provide for synthesis of the desired products.

[0146] Constructs comprising the isolated polynucleotide(s) of interest may be introduced into a microbial host cell by any standard technique. These techniques include transformation (e.g., lithium acetate transformation [Methods in Enzymology, 194:186-187 (1991)]), protoplast transformation, bolistic impact, electroporation, microinjection, or any other method that introduces the gene(s) of interest into the host cell.

[0147] For convenience, a host cell that has been manipulated by any method to take up a DNA sequence (e.g., an expression cassette) will be referred to as “transformed”, “transformant” or “recombinant” herein. The transformed host will have at least one copy of the expression construct and may have two or more, depending upon whether the expression cassette is integrated into the genome or is present on an extrachromosomal element having multiple copy numbers.

[0148] The transformed host cell can be identified by various selection techniques, as described in U.S. Pat. No. 7,238,482, U.S. Pat. No. 7,259,255 and PCT Publication No. WO 2006/052870.

[0149] Following transformation, fatty acid substrates suitable for binding to ACBP may be produced by the host either naturally or transgenically, or they may be provided exogenously. In preferred embodiments, however, the oleaginous microbial organism possesses the ability to produce PUFAs, either naturally or via techniques of genetic engineering. Frequently, it will be expected that the microbial organism will comprise heterologous genes encoding a functional PUFA biosynthetic pathway (although this should not be construed as a limitation herein).

[0150] If the desired PUFAs (or desired lipid profile) are not endogenously produced by the microbial organism, one skilled in the art will be familiar with the considerations and techniques necessary to introduce an expression cassette(s) encoding appropriate enzymes for PUFA biosynthesis into the microbial organism of choice. Although these issues are not elaborated in detail herein, numerous teachings are provided in the literature; and, some illustrative references are provided as follows, although these should not be construed as limiting: WO 98/46763; WO 98/46764; WO 98/46765; WO 99/64616; WO 02/077213; WO 03/093482; WO 04/057001; WO 04/090123; WO 04/087902; U.S. Pat. No. 6,140,486; U.S. Pat. No. 6,459,018; U.S. Pat. No. 6,136,574; U.S. Pat. No. 7,238,482; U.S. 03/0172399; U.S. 04/0172682; U.S. 04/098762; U.S. 04/0111763; U.S. 04/0053379; U.S. 04/0049805; U.S. 04/0237139; U.S. 04/0172682; Beaudoin F. et al., PNAS USA, 97(12):6421-6426 (2000); Dyer, J. M. et al., Appl. Envi. Microbiol., 59:224-230 (2002); Domergue, F. et al. Eur. J. Biochem. 269:4105A4113 (2002); Qi, B. et al., Nature Biotech. 22:739-745 (2004); and Abbadi et al., The Plant Cell, 16:2734-2748 (2004)).

[0151] Briefly, however, a variety of ω-3/ω-6 PUFA products can be produced (prior to their transfer to TAGs), depending on the fatty acid substrate and the particular genes of the ω-3/ω-6 fatty acid biosynthetic pathway that are present in (or transformed into) the microbial cell. As such, production of the desired fatty acid product can occur directly (wherein the fatty acid substrate is converted directly into the desired fatty acid product without any intermediate steps or pathway intermediates) or indirectly (wherein multiple genes encoding the PUFA biosynthetic pathway may be used in combination, such that a series of reactions occur to produce a desired PUFA). Specifically, for example, it may be desirable to transform an oleaginous yeast with expression cassette(s) comprising Δ9 elongase, Δ8 desaturase, Δ5 desaturase and Δ17 desaturase for the overproduction of EPA. As is well known to one skilled in the art, various other combinations of the following enzymatic activities may be useful to express in an oleaginous organism: Δ6 desaturases, C_{18/20} elongases, Δ5 desaturases, Δ17 desaturases, Δ15 desaturases, Δ9 desaturases, Δ12 desaturases, C_{14/16} elongases, C_{16/18} elongases, Δ9 elongases, Δ8 desaturases, Δ4 desaturases and C_{20/22} elongases (see FIG. 1). The particular genes included within a particular expression cassette will depend on the oleaginous organism (and its PUFA profile and/or desaturase/elongase profile), the availability of substrate and the desired end product(s).

[0152] One skilled in the art will be able to identify various candidate genes encoding each of the enzymes desired for ω-3/ω-6 fatty acid biosynthesis, based on publicly available literature (e.g., GenBank), the patent literature, and experimental analysis of organisms having the ability to produce PUFAs. Useful desaturase and elongase sequences may be derived from any source, e.g., isolated from a natural source (from bacteria, algae, fungi, plants, animals, etc.), produced via a semi-synthetic route or synthesized de novo. Although the particular source of the desaturase and elongase genes introduced into the host is not critical, considerations for choosing a specific polypeptide having desaturase or elongase activity include: 1) the substrate specificity of the polypeptide; 2) whether the polypeptide or a component thereof is a rate-limiting enzyme; 3) whether the desaturase or elongase is essential for synthesis of a desired PUFA; 4) co-factors required by the polypeptide; and/or, 5) whether the polypeptide was modified after its production (e.g., by a kinase or a prenyltransferase). The expressed polypeptide preferably has parameters compatible with the biochemical environment of its location in the host cell (see U.S. Pat. No. 7,238,482 for additional details).

[0153] In additional embodiments, it will also be useful to consider the conversion efficiency of each particular desaturase and/or elongase. More specifically, since each enzyme rarely functions with 100% efficiency to convert substrate to product, the final lipid profile of unpurified oils produced in a host cell will typically be a mixture of various PUFAs consisting of the desired ω-3/ω-6 fatty acid, as well as various upstream intermediary PUFAs. Thus, each enzyme's conversion efficiency is also a variable to consider, when optimizing biosynthesis of a desired fatty acid.

[0154] Microbial host cells for suitable for manipulation of the total lipid content and/or fatty acid composition as disclosed herein may include hosts that grow on a variety of feedstocks, including simple or complex carbohydrates, fatty acids, organic acids, oils, glycerol and alcohols, and/or hydrocarbons over a wide range of temperature and pH values. Based on the needs of the Applicants' Assignee, the methods have been developed for use in oleaginous yeast (and in particular Yarrowia lipolytica); however, it is contemplated that because transcription, translation and the protein biosynthetic apparatus are highly conserved, any bacteria, yeast, algae, euglenoid, stramenopiles and/or fungus will be a suitable oleaginous microbe.

[0155] Preferred microbial hosts, however, are oleaginous organisms, such as oleaginous yeasts. These organisms are naturally capable of oil synthesis and accumulation, wherein the oil can comprise greater than about 25% of the cellular dry weight, more preferably greater than about 30% of the cellular dry weight, and most preferably greater than about 40% of the cellular dry weight. Genera typically identified as oleaginous yeast include, but are not limited to: Yarrowia, Candida, Rhodotorula, Rhodosporidium, Cryptococcus, Trichosporon and Lipomyces. More specifically, illustrative oil-synthesizing yeasts include: Rhodosporidium toruloides, Lipomyces starkeyii, L. lipoferus, Candida revkaufi, C. pulcherrima, C. tropicalis, C. utilis, Trichosporon pullans, T. cutaneum, Rhodotorula glutinus, R. graminis, and Yarrowia lipolytica (formerly classified as Candida lipolytica). In alternate embodiments, oil biosynthesis may be genetically engineered such that the microbial host cell (e.g., a yeast) can produce more than 25% oil of the cellular dry weight, and thereby be considered oleaginous.

[0156] Most preferred is the oleaginous yeast Yarrowia lipolytica; and, in a further embodiment, most preferred are the Y. lipolytica strains designated as ATCC #20362, ATCC #8862, ATCC #18944, ATCC #76982 and/or LGAM S(7)1 (Papanikolaou S., and Aggelis G., Bioresour. Technol., 82(1):43-9 (2002)).

[0157] Specific teachings applicable for transformation of oleaginous yeasts (i.e., Yarrowia lipolytica) include U.S. Pat. No. 4,880,741 and U.S. Pat. No. 5,071,764 and Chen, D. C. et al. (Appl. Microbiol. Biotechnol., 48(2):232-235 (1997)). Specific teachings applicable for engineering GLA, ARA, EPA and DHA production in Y. lipolytica are provided in U.S. patent application Ser. No. 11/198,975 (PCT Publication No. WO 2006/033723), U.S. patent application Ser. No. 11/264,784 (PCT Publication No. WO 2006/055322), U.S. patent application Ser. No. 11/265,761 (PCT Publication No. WO 2006/052870) and U.S. patent application Ser. No. 11/264,737 (PCT Publication No. WO 2006/052871), respectively.

[0158] The preferred method of expressing isolated polynucleotide(s) in this yeast is by integration of linear DNA into the genome of the host; and, integration into multiple locations within the genome can be particularly useful when high level expression of genes are desired [e.g., in the Ura3 locus (GenBank Accession No. AJ306421), the Leu2 gene locus (GenBank Accession No. AF260230), the Lys5 gene locus (GenBank Accession No. M34929), the Aco2 gene locus (GenBank Accession No. AJ001300), the Pox3 gene locus (Pox3: GenBank Accession No. XP_{—}503244; or, Aco3: GenBank Accession No. AJ001301), the Δ12 desaturase gene locus (U.S. Pat. No. 7,214,491), the Lip1 gene locus (GenBank Accession No. Z50020), the Lip2 gene locus (GenBank Accession No. AJ012632), the SCP2 gene locus (GenBank Accession No. AJ431362), the Pex3 gene locus (GenBank Accession No. CAG78565), the Pex16 gene locus (GenBank Accession No. CAG79622) and/or the Pex10 gene locus (GenBank Accession No. CAG81606)].

[0159] Preferred selection methods for use in Yarrowia lipolytica are resistance to kanamycin, hygromycin and the amino glycoside G418, as well as ability to grow on media lacking uracil, leucine, lysine, tryptophan or histidine. In alternate embodiments, 5-fluoroorotic acid (5-fluorouracil-6-carboxylic acid monohydrate; “5-FOA”) is used for selection of yeast Ura⁻ mutants (U.S. Pat. Pub. No. 2009-0093543-A1), or a native acetohydroxyacid synthase (or acetolactate synthase; E.C. 4.1.3.18) that confers sulfonyl urea herbicide resistance (PCT Publication No. WO 2006/052870) is utilized for selection of transformants.

[0160] In yet another aspect, the invention concerns a method for increasing the total lipid content in a Yarrowia sp., comprising:
[0161] a) providing Yarrowia sp., comprising:
   [0162] i) a recombinant construct comprising at least one isolated polynucleotide comprising a nucleic acid sequence encoding an acyl-CoA binding protein, said protein selected from the group consisting of:
      [0163] (a) a protein consisting essentially of the sequence set forth in SEQ ID NO:2; and
      [0164] (b) a protein comprising the following amino acid sequence motifs: SEQ ID NO:36, SEQ ID NO:37 and SEQ ID NO:38;
   [0165] wherein said isolated polynucleotide is operably linked to at least one regulatory sequence; and
   [0166] ii) a source of fatty acids;
[0167] b) growing the Yarrowia sp. of step (a) under conditions whereby the expression of the acyl-CoA binding protein results in an increased total lipid content of at least 5% when compared to the total lipid content of a Yarrowia sp. lacking said recombinant construct; and,
[0168] c) optionally recovering the total lipids of step (b).

[0169] Preferably, expression of ACBP results in an increased total lipid content of at least 10% when compared to the lipid content of a Yarrowia sp. lacking said recombinant construct, more preferably an increased lipid content of at least 15%, and most preferably an increased lipid content of at least 20%. Higher percent increases in the lipid content may additionally require expression of at least one DAG AT sequence, in addition to the ACBP, wherein the DAG AT is preferably selected from the group consisting of DGAT1 (e.g., SEQ ID NO:4), DGAT2 (e.g., SEQ ID NOs:6, 8, 9, 10 and 11) or a combination thereof.

[0170] In some embodiments, the fatty acids of step (b) are endogenously produced, preferably by expression of a functional ω-3/ω-6 fatty acid biosynthetic pathway including at least one desaturase enzyme (e.g., selected from the group consisting of Δ4 desaturase, Δ5 desaturase, Δ9 desaturase, Δ12 desaturase, Δ15 desaturase, Δ17 desaturase, Δ8 desaturase). Modification of the expression of ACBP in these Yarrowia sp. will result in an altered rate of desaturation by the desaturase, thereby resulting in an altered transfer of the synthesized fatty acids to TAG and an altered fatty acid composition.

[0171] Other suitable microbial hosts include oleaginous bacteria, algae, euglenoids, stramenopiles and other fungi; and, within this broad group of microbial hosts, of particular interest are microorganisms that synthesize ω-3/ω-6 fatty acids (or those that can be genetically engineered for this purpose [e.g., other yeast such as Saccharomyces cerevisiae]). Thus, for example, overexpression of a native ACBP in Mortierella alpina (which is commercially used for production of ARA) should yield a transformant organism having increased total lipid content. The method of transformation of M. alpina is described by Mackenzie et al. (Appl. Environ. Microbiol., 66:4655 (2000)). Similarly, methods for transformation of Thraustochytriales microorganisms (e.g., Thraustochytrium, Schizochytrium) are disclosed in U.S. Pat. No. 7,001,772.

[0172] Irrespective of the host selected for modifying the total lipid content and/or composition as described herein, multiple transformants must be screened in order to obtain a strain displaying the desired expression level and pattern. Such screening may be accomplished by Southern analysis of DNA blots (Southern, J. Mol. Biol., 98:503 (1975)), Northern analysis of mRNA expression (Kroczek, J. Chromatogr. Biomed. Appl., 618(1-2):133-145 (1993)), Western and/or Elisa analyses of protein expression, phenotypic analysis or GC analysis of the PUFA products.

[0173] Also described herein are oleaginous microbial organisms produced by the methods described herein. This therefore includes oleaginous bacteria, algae, moss, euglenoids, stramenopiles fungi and yeast, comprising in their genome a recombinant ACBP construct. Additionally, lipids and oils obtained from these oleaginous organisms, products obtained from the processing of the lipids and oil, use of these lipids and oil in foods, animal feeds or industrial applications and/or use of the by-products in foods or animal feeds are also described.

[0174] The transformed microbial host cell is grown under conditions that optimize expression of ACBP and produce the greatest and most economical yield of fatty acids, preferably comprising an optimal PUFA composition. In general, media conditions that may be optimized include the type and amount of carbon source, the type and amount of nitrogen source, the carbon-to-nitrogen ratio, the amount of different mineral ions, the oxygen level, growth temperature, pH, length of the biomass production phase, length of the oil accumulation phase and the time and method of cell harvest. Microorganisms of interest, such as oleaginous yeast (e.g., Yarrowia lipolytica) are generally grown in complex media (e.g., yeast extract-peptone-dextrose broth (YPD)) or a defined minimal media that lacks a component necessary for growth and thereby forces selection of the desired expression cassettes (e.g., Yeast Nitrogen Base (DIFCO Laboratories, Detroit, Mich.)).

[0175] Fermentation media used herein must contain a suitable carbon source. Suitable carbon sources are taught in U.S. Pat. No. 7,238,482. Although it is contemplated that the source of carbon utilized may encompass a wide variety of carbon-containing sources, preferred carbon sources are sugars (e.g., glucose), glycerol, and/or fatty acids.

[0176] Nitrogen may be supplied from an inorganic (e.g., (NH₄)₂SO₄) or organic (e.g., urea or glutamate) source. In addition to appropriate carbon and nitrogen sources, the fermentation media must also contain suitable minerals, salts, cofactors, buffers, vitamins and other components known to those skilled in the art suitable for the growth of the oleaginous host and promotion of the enzymatic pathways necessary for PUFA production. Particular attention is given to several metal ions (e.g., Fe⁺², Cu⁺², Mn⁺², Co⁺², Zn⁺², Mg⁺²) that promote synthesis of lipids and PUFAs (Nakahara, T. et al., Ind. Appl. Single Cell Oils, D. J. Kyle and R. Colin, eds. pp 61-97 (1992)).

[0177] Preferred growth media are common commercially prepared media, such as Yeast Nitrogen Base (DIFCO Laboratories, Detroit, Mich.). Other defined or synthetic growth media may also be used and the appropriate medium for growth of the transformant host cells will be known by one skilled in the art of microbiology or fermentation science. A suitable pH range for the fermentation is typically between about pH 4.0 to pH 8.0, wherein pH 5.5 to pH 7.5 is preferred as the range for the initial growth conditions. The fermentation may be conducted under aerobic or anaerobic conditions, wherein microaerobic conditions are preferred.

[0178] Typically, accumulation of high levels of PUFAs in oleaginous yeast cells requires a two-stage process, since the metabolic state must be “balanced” between growth and synthesis/storage of fats. Thus, most preferably, a two-stage fermentation process is necessary for the production of PUFAs in oleaginous yeast (e.g., Yarrowia lipolytica). This approach is described in U.S. Pat. No. 7,238,482, as are various suitable fermentation process designs (i.e., batch, fed-batch and continuous) and considerations during growth.

[0179] PUFAs may be found in the host microorganisms as free fatty acids or in esterified forms such as acylglycerols, phospholipids, sulfolipids or glycolipids, and may be extracted from the host cells through a variety of means well-known in the art. One review of extraction techniques, quality analysis and acceptability standards for yeast lipids is that of Z. Jacobs (Critical Reviews in Biotechnology, 12(5/6):463-491 (1992)). A brief review of downstream processing is also available by A. Singh and O. Ward (Adv. Appl. Microbiol., 45:271-312 (1997)).

[0180] In general, means for the purification of PUFAs may include extraction (e.g., U.S. Pat. No. 6,797,303 and U.S. Pat. No. 5,648,564) with organic solvents, sonication, supercritical fluid extraction (e.g., using carbon dioxide), saponification and physical means such as presses, or combinations thereof. One is referred to the teachings of U.S. Pat. No. 7,238,482 for additional details.

[0181] There are a plethora of food and feed products, incorporating ω-3 and/or ω-6 fatty acids (particularly e.g., ALA, GLA, ARA, EPA, DPA and DHA). It is contemplated that the microbial biomass comprising long-chain PUFAs, partially purified microbial biomass comprising PUFAs, purified microbial oil comprising PUFAs, and/or purified PUFAs will function in food and feed products to impart the health benefits of current formulations. More specifically, oils containing ω-3 and/or ω-6 fatty acids will be suitable for use in a variety of food and feed products including, but not limited to: food analogs, meat products, cereal products, baked foods, snack foods and dairy products (see Patent Publication No. US-2006-0094092 for details).

[0182] Additionally, the present compositions may be used in formulations to impart health benefit in medical foods including medical nutritionals, dietary supplements, infant formula as well as pharmaceutical products. One of skill in the art of food processing and food formulation will understand how the amount and composition of the present oils may be added to the food or feed product. Such an amount will be referred to herein as an “effective” amount and will depend on the food or feed product, the diet that the product is intended to supplement or the medical condition that the medical food or medical nutritional is intended to correct or treat.

### EXAMPLES

[0183] The present invention is further described in the following Examples, which illustrate reductions to practice of the invention but do not completely define all of its possible variations.

### General Methods

[0184] Standard recombinant DNA and molecular cloning techniques used in the Examples are well known in the art and are described by:

1) Sambrook, J., Fritsch, E. F. and Maniatis, T., Molecular Cloning: A Laboratory Manual; Cold Spring Harbor Laboratory: Cold Spring Harbor, N.Y. (1989) (Maniatis); 2) T. J. Silhavy, M. L. Bennan, and L. W. Enquist, Experiments with Gene Fusions; Cold Spring Harbor Laboratory: Cold Spring Harbor, N.Y. (1984); and, 3) Ausubel, F. M. et al., Current Protocols in Molecular Biology, published by Greene Publishing Assoc. and Wiley-Interscience, Hoboken, N.J. (1987).

[0185] Materials and methods suitable for the maintenance and growth of microbial cultures are well known in the art. Techniques suitable for use in the following examples may be found as set out in Manual of Methods for General Bacteriology (Phillipp Gerhardt, R. G. E. Murray, Ralph N. Costilow, Eugene W. Nester, Willis A. Wood, Noel R. Krieg and G. Briggs Phillips, Eds), American Society for Microbiology: Washington, D.C. (1994)); or by Thomas D. Brock in Biotechnology: A Textbook of Industrial Microbiology, 2^{nd} ed., Sinauer Associates: Sunderland, Mass. (1989). All reagents, restriction enzymes and materials used for the growth and maintenance of microbial cells were obtained from Aldrich Chemicals (Milwaukee, Wis.), DIFCO Laboratories (Detroit, Mich.), GIBCO/BRL (Gaithersburg, Md.), or Sigma Chemical Company (St. Louis, Mo.), unless otherwise specified. E. coli strains were typically grown at 37° C. on Luria Bertani [“LB”] plates.

[0186] General molecular cloning was performed according to standard methods (Sambrook et al., supra). DNA sequence was generated on an ABI Automatic sequencer using dye terminator technology (U.S. Pat. No. 5,366,860; EP 272,007) using a combination of vector and insert-specific primers. Sequence editing was performed in Sequencher (Gene Codes Corporation, Ann Arbor, Mich.). All sequences represent coverage at least two times in both directions. Comparisons of genetic sequences were accomplished using DNASTAR software (DNASTAR Inc., Madison, Wis.).

[0187] The meaning of abbreviations is as follows: “sec” means second(s), “min” means minute(s), “hr” means hour(s), “d” means day(s), “μL” means microliter(s), “mL” means milliliter(s), “L” means liter(s), “μM” means micromolar, “mM” means millimolar, “M” means molar, “mmol” means millimole(s), “μmole” mean micromole(s), “g” means gram(s), “μg” means microgram(s), “ng” means nanogram(s), “U” means unit(s), “bp” means base pair(s) and “kB” means kilobase(s).

### Nomenclature for Expression Cassettes:

[0188] The structure of an expression cassette will be represented by a simple notation system of “X::Y::Z”, wherein X describes the promoter fragment, Y describes the gene fragment, and Z describes the terminator fragment, which are all operably linked to one another.

Transformation and Cultivation of Yarrowia lipolytica:

[0189] Yarrowia lipolytica strains with ATCC Accession Nos. #20362, #76982 and #90812 were purchased from the American Type Culture Collection (Rockville, Md.). Yarrowia lipolytica strains were typically grown at 28-30° C. in several media, according to the recipes shown below. Agar plates were prepared as required by addition of 20 g/L agar to each liquid media, according to standard methodology.
[0190] YPD agar medium (per liter): 10 g of yeast extract [Difco]; 20 g of Bacto peptone [Difco]; and 20 g of glucose.
[0191] Basic Minimal Media (MM) (per liter): 20 g glucose; 1.7 g yeast nitrogen base without amino acids; 1.0 g proline; and pH 6.1 (not adjusted).
[0192] Minimal Media+5-Fluoroorotic Acid (MM+5-FOA) (per liter): 20 g glucose; 6.7 g Yeast Nitrogen base; 75 mg uracil; 75 mg uridine; and appropriate amount of FOA (Zymo Research Corp., Orange, Calif.), based on FOA activity testing against a range of concentrations from 100 mg/L to 1000 mg/L (since variation occurs within each batch received from the supplier).
[0193] High Glucose Media (HGM) (per liter): 80 glucose; 2.58 g KH₂PO₄; and 5.36 g K₂HPO₄; pH 7.5 (do not need to adjust).
[0194] Fermentation medium (FM) (per liter): 6.70 g/L Yeast nitrogen base; 6.00 g KH₂PO₄; 2.00 g K₂HPO₄; 1.50 g MgSO₄.7H₂O; 20 g glucose; and 5.00 g Yeast extract (BBL).

[0195] Transformation of Yarrowia lipolytica was performed according to the method of Chen, D. C. et al. (Appl. Microbiol. Biotechnol., 48(2):232-235 (1997)), unless otherwise noted. Briefly, Yarrowia was streaked onto a YPD plate and grown at 30° C. for approximately 18 hr. Several large loopfuls of cells were scraped from the plate and resuspended in 1 mL of transformation buffer, comprising: 2.25 mL of 50% PEG, average MW 3350; 0.125 mL of 2 M lithium acetate, pH 6.0; 0.125 mL of 2 M DTT; and (optionally) 50 μg sheared salmon sperm DNA. Then, approximately 500 ng of linearized plasmid DNA (or 100 ng circular plasmid) was incubated in 100 μL of resuspended cells, and maintained at 39° C. for 1 hr with vortex mixing at 15 min intervals. The cells were plated onto selection media plates and maintained at 30° C. for 2 to 3 days.

Fatty Acid Analysis of Yarrowia lipolytica:

[0196] Unless otherwise stated, for fatty acid analysis cells were collected by centrifugation and lipids were extracted as described in Bligh, E. G. & Dyer, W. J. (Can. J. Biochem. Physiol., 37:911-917 (1959)). Fatty acid methyl esters [“FAMEs”] were prepared by transesterification of the lipid extract with sodium methoxide (Roughan, G. and Nishida I., Arch Biochem Biophys., 276(1):38-46 (1990)) and subsequently analyzed with a Hewlett-Packard 6890 GC fitted with a 30 m×0.25 mm (i.d.) HP-INNOWAX (Hewlett-Packard) column. The oven temperature was from 170° C. (25 min hold) to 185° C. at 3.5° C./min.

[0197] For direct base transesterification, Yarrowia culture (3 mL) was harvested, washed once in distilled water, and dried under vacuum in a Speed-Vac for 5-10 min. Sodium methoxide (100 μL of 1%) was added to the sample, and then the sample was vortexed and rocked for 20 min. After adding 3 drops of 1 M NaCl and 400 μL hexane, the sample was vortexed and spun. The upper layer was removed and analyzed by GC as described above.

Construction of Yarrowia lipolytica Strains Y4036U And Y4305U1:

[0198] Strain Y4036U, derived from Yarrowia lipolytica ATCC #20362, is capable of producing DGLA in the total lipids via expression of a Δ9 elongase/Δ8 desaturase pathway. Y. lipolytica strain Y4036U was used as the host in Example 1, infra.

[0199] Strain Y4305U1, derived from Yarrowia lipolytica strain Y4036U, is capable of producing about 53.2% EPA relative to the total lipids via expression of a Δ9 elongase/Δ8 desaturase pathway. Y. lipolytica strain Y4305U1 was used as the host in Example 2, infra.

[0200] Briefly, as diagrammed in FIG. 2, strain Y4305U1 was derived from Yarrowia lipolytica ATCC #20362 via construction of strain Y2224 (a FOA resistant mutant from an autonomous mutation of the Ura3 gene of wildtype Yarrowia strain ATCC #20362), strain Y4001 (producing 17% EDA with a Leu-phenotype), strain Y4001U1 (Leu- and Ura-), strain Y4036 (producing 18% DGLA with a Leu-phenotype), strain Y4036U (Leu- and Ura-), strain Y4070 (producing 12% ARA with a Ura-phenotype), strain Y4086 (producing 14% EPA), strain Y4086U1 (Ura-), strain Y4128 (producing 37% EPA; deposited with the American Type Culture Collection on Aug. 23, 2007, bearing the designation ATCC PTA-8614), strain Y4128U3 (Ura-), strain Y4217 (producing 42% EPA), strain Y4217U2 (Ura-), strain Y4259 (producing 46.5% EPA), strain Y4259U2 (Ura-) and strain Y4305 (producing 53.2% EPA relative to the total TFAs). Further details regarding the construction of strains Y2224, Y4001, Y4001U, Y4036, Y4036U, Y4070, Y4086, Y4086U1, Y4128, Y4128U3, Y4217, Y4217U2, Y4259, Y4259U2, Y4305 and Y4305U3 are described in the General Methods of U.S. Pat. App. Pub. No. 2008-0254191 and in Examples 1-3 of U.S. Pat. App. Pub. No. 2009-0093543, hereby incorporated herein by reference.

[0201] The final genotype of strain Y4036U with respect to wild type Yarrowia lipolytica ATCC #20362 was Ura3-, YAT1::ME3S::Pex16, EXP1::EgD9eS::Lip1, FBAINm::EgD9eS::Lip2, GPAT::EgD9e::Lip2, FBAINm::EgD8M::Pex20, EXP1::EgD8M::Pex16, GPD::FmD12::Pex20, YAT1::FmD12::OCT (wherein FmD12 is a Fusarium moniliforme A12 desaturase gene [U.S. Pat. No. 7,504,259]; ME3S is a codon-optimized C_{16/18} elongase gene, derived from Mortierella alpina [U.S. Pat. No. 7,470,532]; EgD9e is a Euglena gracilis Δ9 elongase gene [Int'l. App. Pub. No. WO 2007/061742]; EgD9eS is a codon-optimized A9 elongase gene, derived from Euglena gracilis [Int'l. App. Pub. No. WO 2007/061742]; and, EgD8M is a synthetic mutant A8 desaturase [Int'l. App. Pub. No. WO 2008/073271], derived from Euglena gracilis [U.S. Pat. No. 7,256,033]).

[0202] The complete lipid profile of strain Y4305 was as follows, wherein the concentration of each fatty acid is expressed as a weight percentable of the TFAs: 16:0 (2.8%), 16:1 (0.7%), 18:0 (1.3%), 18:1 (4.9%), 18:2 (17.6%), ALA (2.3%), EDA (3.4%), DGLA (2.0%), ARA (0.6%), ETA (1.7%), and EPA (53.2%). The total lipid content of cells [“TFAs % DCW”] was 27.5.

[0203] The final genotype of strain Y4305 with respect to wild type Yarrowia lipolytica ATCC #20362 was SCP2- (YALI0E01298g), YALI0C18711g-, Pex10-, YALI0F24167g-, unknown 1-, unknown 3-, unknown 8-, GPD::FmD12::Pex20, YAT1::FmD12::OCT, GPM/FBAIN::FmD12S::OCT, EXP1::FmD12S::Aco, YAT1::FmD12S::Lip2, YAT1::ME3S::Pex16, EXP1::ME3S::Pex20 (3 copies), GPAT::EgD9e::Lip2, EXP1::EgD9eS::Lip1, FBAlNm::EgD9eS::Lip2, FBA::EgD9eS::Pex20, GPD::EgD9eS::Lip2, YAT1::EgD9eS::Lip2, YAT1::E389D9eS::OCT, FBAINm::EgD8M::Pex20, FBAIN::EgD8M::Lip1 (2 copies), EXP1::EgD8M::Pex16, GPDIN::EgD8M::Lip1, YAT1::EgD8M::Aco, FBAIN::EgD5::Aco, EXP1::EgD5S::Pex20, YAT1::EgD5S::Aco, EXP1::EgD5S::ACO, YAT1::RD5S::OCT, YAT1::PaD17S::Lip1, EXP1::PaD17::Pex16, FBAINm::PaD17::Aco, YAT1::YICPT1::ACO, GPD::YICPT1::ACO (wherein FmD12 is a Fusarium moniliforme A12 desaturase gene [U.S. Pat. No. 7,504,259]; FmD12S is a codon-optimized A12 desaturase gene, derived from Fusarium moniliforme [U.S. Pat. No. 7,504,259]; ME3S is a codon-optimized C_{16/18} elongase gene, derived from Mortierella alpina [U.S. Pat. No. 7,470,532]; EgD9e is a Euglena gracilis Δ9 elongase gene [Int'l. App. Pub. No. WO 2007/061742]; EgD9eS is a codon-optimized A9 elongase gene, derived from Euglena gracilis [Int'l. App. Pub. No. WO 2007/061742]; E389D9eS is a codon-optimized A9 elongase gene, derived from Eutreptiella sp. CCMP389 [Int'l. App. Pub. No. WO 2007/061742]; EgD8M is a synthetic mutant Δ8 desaturase [Int'l. App. Pub. No. WO 2008/073271], derived from Euglena gracilis [U.S. Pat. No. 7,256,033]; EgD5 is a Euglena gracilis Δ5 desaturase [U.S. Pat. App. Pub. No. 2007-0292924-A1]; EgD5S is a codon-optimized A5 desaturase gene, derived from Euglena gracilis [U.S. Pat. App. Pub. No. 2007-0292924]; RD5S is a codon-optimized A5 desaturase, derived from Peridinium sp. CCMP626 [U.S. Pat. App. Pub. No. 2007-0271632]; PaD17 is a Pythium aphanidermatum Δ17 desaturase [Int'l. App. Pub. No. WO 2008/054565]; PaD17S is a codon-optimized Δ17 desaturase, derived from Pythium aphanidermatum [Int'l. App. Pub. No. WO 2008/054565]; and, YICPT1 is a Yarrowia lipolytica diacylglycerol cholinephosphotransferase [Int'l. App. Pub. No. WO 2006/052870]).

[0204] Strains Y4305U1, Y4305U2 and Y4305U3 ((collectively, Y4305U) were generated by integrating a Ura3 mutant gene into the Ura3 gene of strain Y4305.

### Example 1

### Chromosomal Deletion of YL ACBP Reduced Lipid Accumulation in Yarrowia lipolytica Strain Y4036U

[0205] The present Example describes the construction of pYPS161-ACBP, a vector used to disrupt the chromosomal acb1 gene (i.e., YL ACBP, set forth as SEQ ID NO:1) from the DGLA-producing Yarrowia strain Y4036U. Transformation of Y. lipolytica strain Y4036U with the acb1 knockout construct resulted in creation of strain Y4036U Δacb1. The effect of the acb1 knockout on total oil and DGLA level was determined and compared. Specifically, knockout of acb1 resulted in a reduced amount of total lipid in the cell.

Construct pYPS161-ACBP

[0206] Plasmid pYPS161-ACBP (FIG. 3) was derived from plasmid pYPS161 (SEQ ID NO:12, comprising a Yarrowia URA3 gene, ColE1 plasmid origin of replication, and ampicillin-resistance gene for selection in E. coli) and constructed to generate an acb1 deletion strain of Yarrowia lipolytica. The pYPS161-ACBP plasmid thereby contains the following components:

TABLE 3
Description of Plasmid pYPS161-ACBP (SEQ ID NO: 13)

| RE Sites And | |
|---|---|
| Nucleotides | |
| Within SEQ ID | Description Of Fragment And |
| NO: 13 | Chimeric Gene Components |
| AscI/BsiWI | 1576 bp 5′ promoter region of Yarrowia lipolytica ACB1 gene |
| (3149-4725) | (ORF YALI0E23185g within the public Y. lipolytica protein |
| | database of the “Yeast project Genolevures” (Center for |
| | Bioinformatics, LaBRI, Talence Cedex, France) |
| PacI/SphI | 448 bp 3′ terminator region of Yarrowia lipolytica ACB1 gene |
| (1-449) | (ORF YALI0E23185g, supra) |
| Sa/I/EcoRI | Yarrowia URA3 gene (GenBank Accession No. AJ306421) |
| (5678-7297) | |
| 2222-3102 | ColE1 plasmid origin of replication |
| 1304-2164 | ampicillin-resistance gene (Amp^{R}) for selection in E. coli |
| 696-1096 | E. coli f1 origin of replication |

Generation of Yarrowia lipotytica Knockout Strain Y4036U Δacb1

[0207] Standard protocols were used to transform Yarrowia lipolytica strain Y4036U (see General Methods) with the purified 4.6 kB AscI/SphI fragment of ACB1 knockout construct pYPS161-ACBP. The fragment contained the URA3 gene as a selectable marker to facilitate selection of transformants on media plates lacking uracil.

[0208] To screen for the acb1 deleted mutant, colony PCR was performed using Taq polymerase (Invitrogen; Carlsbad, Calif.), and the PCR primers ACBPFii (SEQ ID NO:14) and ACBPRii (SEQ ID NO:15). This set of primers was designed to amplify a 0.8 kB region of the intact ACB1 gene, and therefore the acb1 deleted mutant would not produce the 0.8 kB band. A second set of primers was designed to produce a band only when the ACB1 gene was deleted. Specifically, one primer (i.e., 3UTR-URA3; SEQ ID NO:16) binds to a region in the vector sequences of the introduced 4.6 kB Ascl/SphI disruption fragment, and the other primer (i.e., 3R-ACBPn; SEQ ID NO:17) binds to the ACB1 terminator sequences of chromosome outside of the homologous region of the disruption fragment.

[0209] More specifically, the colony PCR was performed using a reaction mixture that contained: 20 mM Tris-HCl (pH 8.4), 50 mM KCl, 1.5 mM MgCl₂, 400 μM each of dGTP, dCTP, dATP, and dTTP, 2 μM each of the primers, 20 μl water and 2 U Taq polymerase. Amplification was carried out as follows: initial denaturation at 94° C. for 120 sec, followed by 35 cycles of denaturation at 94° C. for 60 sec, annealing at 55° C. for 60 sec, and elongation at 72° C. for 120 sec. A final elongation cycle at 72° C. for 5 min was carried out, followed by reaction termination at 4° C.

[0210] Of thirty colonies screened, 25 had the ACB1 knockout fragment integrated at a random site in the chromosome and thus were not Δacb1 mutants but could grow on ura-plates. Three of these random integrants, designated as Y4036U-1, Y4036U-2 and Y4036U-3 were used as controls in oil and lipid production experiments (infra).

[0211] The remaining 5 of 30 colonies screened contained the acb1 knockout. These five Δacb1 mutants within the Y4036U strain background were named RHY14, RHY15, RHY16, RHY17 and RHY18. Further confirmation of the acb1 knockout was performed by quantitative real time PCR on the ACB1 gene (i.e., YL ACBP), with the Yarrowia translation elongation factor (tef-1) gene (GenBank Accession No. AF054510) used as the control. Real time PCR primers and a TaqMan probe targeting the ACB1 gene and the tef-1 gene were designed with Primer Express software v. 2.0 (Applied Biosystems, Foster City, Calif.). Specifically, real time PCR primers ef-324F (SEQ ID NO:18), ef-392R (SEQ ID NO:19), ACB1-378F (SEQ ID NO:20) and ACB1-474R (SEQ ID NO:21) were designed, as well as the TaqMan probes ef-345T (i.e., 5′ 6-FAM™-TGCTGGTGGTGTTGGTGAGTT-TAMRA™, wherein the nucleotide sequence is set forth as SEQ ID NO:22) and ACB1-398T (i.e., 5′-6FAM™-ACCGACCCGGCGCCTTCA-TAMRA™, wherein the nucleotide sequence is set forth as SEQ ID NO:23). The 5′ end of the TaqMan fluorogenic probes have the 6FAM™ fluorescent reporter dye bound, while the 3′ end comprises the TAMRA™ quencher. All primers and probes were obtained from Sigma-Genosys (Woodlands, Tex.).

[0212] The knockout candidate DNA was prepared by suspending 1 colony each of RHY14, RHY15, RHY16, RHY17 and RHY18 in 50 μl of water. Reactions for tef-1 and ACB1 were run separately, in triplicate for each sample. Real time PCR reactions included 20 pmoles each of forward and reverse primers (i.e., ef-324F, ef-392R, ACB1-378F and ACB1-474R, supra), 5 pmoles TaqMan probe (i.e., ef-345T and ACB1-398T, supra), 10 μl TaqMan Universal PCR Master Mix—No AmpErase® Uracil-N-Glycosylase (UNG) (Catalog No. PN 4326614, Applied Biosystems), 1 μl colony suspension and 8.5 μl RNase/DNase free water for a total volume of 20 μl per reaction. Reactions were run on the ABI PRISM® 7900 Sequence Detection System under the following conditions: initial denaturation at 95° C. for 10 min, followed by 40 cycles of denaturation at 95° C. for 15 sec and annealing at 60° C. for 1 min. Real time data was collected automatically during each cycle by monitoring 6-FAM™ fluorescence. Data analysis was performed using tef-1 gene threshold cycle (CT) values for data normalization as per the ABI PRISM® 7900 Sequence Detection System instruction manual.

Evaluation of Total Oil Production in Yarrowia lipotytica Strain Y4036U Δacb1 Mutants

[0213] To evaluate the effect of the ACB1 gene knockout on the total lipid content in the cells and the percent of PUFAs in the total lipid fraction, the ACB1 wild type (i.e., strains Y4036U-1, Y4036U-2 and Y4036U-3 having the ACB1 knockout fragment integrated at a random site in the chromosome) and duplicate acb1 mutant strains (i.e., the Y4036U Δacb1 mutants designated as RHY15, RHY16, RHY17 and RHY18) were grown under comparable oleaginous conditions. Specifically, cultures were grown at a starting OD₆₀₀ of ˜0.1 in 25 mL of fermentation media (FM) in a 125 mL flask for 24 hrs. The cells were harvested by centrifugation for 5 min at 4300 rpm in a 50 mL conical tube. The supernatant was discarded and the cells were re-suspended in 25 mL of HGM and transferred to a new 125 mL flask. The cells were incubated with aeration for an additional 120 hrs at 30° C.

[0214] To determine the dry cell weight [“DCW”], the cells from 5 mL of the HGM-grown cultures were processed. The cultured cells were centrifuged for 5 min at 4300 rpm. The pellet was re-suspended using 10 mL of sterile water and was centrifuged under the same conditions for a second time. The pellet was then re-suspended using 1 mL of sterile water (three times) and was transferred to a pre-weighed aluminum pan. The cell suspension was dried overnight in a vacuum oven at 80° C. The weight of the cells was determined.

[0215] To determine the lipid content, 1 mL of HGM cultured cells were similarly collected by centrifugation for 1 min at 13,000 rpm, total lipids were extracted, and fatty acid methyl esters (FAMEs) were prepared by trans-esterification, and subsequently analyzed with a Hewlett-Packard 6890 GC (General Methods).

[0216] The total dry cell weight of the cells [“DCW’], the total lipid content of cells [“TFAs % DCW”], the concentration of each fatty acid as a weight percent of TFAs [“% TFAs”] and the DGLA content as a percent of the dry cell weight [“DGLA % DCW”] are shown below in Table 4, for each of the ACB1 wild type strains having the ACB1 knockout fragment integrated at a random site in the chromosome (i.e., strains Y4036U-1, Y4036U-2 and Y4036U-3) and for each of the Y4036U Δacb1 mutant strains (i.e., RHY15, RHY16 [grown in duplicate], RHY17 and RHY18 [grown in duplicate]). One of the duplicate cultures of RHY15 and one of the duplicate cultures of RHY17 produced less than 0.5 g/L DCW; thus, sufficient cell mass was not available for analysis and the cultures were not included in the results presented below. More specifically, fatty acids will be identified as 16:0 (palmitate), 16:1 (palmitoleic acid), 18:0 (stearic acid), 18:1 (oleic acid), 18:2 (LA), 20:2 (EDA), 20:3 (DGLA), 20:4 (ARA) and other.

TABLE 4
Lipid Composition of Y4036U Y. lipolytica Strains With Or Without acb1 Deletion

| | | | % TFAs | | | | | | | | | |
|---|---|---|---|---|---|---|---|---|---|---|---|---|
| | | TFAs % | 16:0 | 16:1 | 18:0 | 18:1 | 18:2 | 20:2 | 20:3 | 20;4 | | DGLA % |
| Strain | DCW | DCW | Palmitic | Palmitoleic | Stearic | Oleic | Linoleic | EDA | DGLA | ARA | Other | DCW |
| Y4036U-1 | 2.88 | 23 | 8.2 | 4.1 | 1.9 | 21.9 | 31.7 | 7.7 | 16.6 | 0.4 | 7.6 | 3.8 |
| Y4036U-2 | 4.16 | 26 | 7.7 | 2.6 | 3.3 | 24.8 | 28.3 | 10.0 | 16.4 | 0.3 | 6.5 | 4.2 |
| Y4036U-3 | 1.96 | 20 | 7.6 | 4.4 | 1.7 | 20.5 | 27.8 | 9.9 | 18.5 | 0.4 | 9.2 | 3.7 |
| Y4036U- | | 23 | | | | | | | 17.2 | | | 3.9 |
| average | | | | | | | | | | | | |
| RHY15-1 | 2.28 | 16 | 5.4 | 1.1 | 2.2 | 19.4 | 36.6 | 9.3 | 21.3 | 0.4 | 4.2 | 3.4 |
| RHY16-1 | 1.28 | 14 | 5.6 | 1.3 | 1.8 | 18.6 | 35.6 | 9.8 | 22.0 | 0.0 | 5.2 | 3.0 |
| RHY16-2 | 3.30 | 17 | 5.1 | 1.0 | 2.5 | 19.3 | 36.9 | 9.0 | 21.2 | 0.4 | 4.7 | 3.7 |
| RHY17-1 | 3.68 | 17 | 5.1 | 0.9 | 2.6 | 19.6 | 36.4 | 9.3 | 21.1 | 0.4 | 4.6 | 3.6 |
| RHY18-1 | 1.96 | 14 | 5.5 | 1.2 | 2.0 | 19.5 | 36.3 | 9.8 | 21.6 | 0.4 | 3.7 | 3.1 |
| RHY18-2 | 2.00 | 15 | 5.4 | 1.2 | 2.0 | 19.4 | 36.1 | 9.9 | 21.6 | 0.5 | 4.0 | 3.2 |
| Y4036U | | 15 | | | | | | | 21.4 | | | 3.3 |
| Δacb1- | | | | | | | | | | | | |
| average | | | | | | | | | | | | |

[0217] Table 4 shows that there was an approximately 30% decrease in total oil content (TFAs % DCW) for the chromosomal acb1 deletion in Y4036U, compared to that for the wild type ACB1 Y4036U strain. There was approximately a 20% increase in DGLA % TFAs in the acb1 mutants but the DGLA productivity (DGLA % DCW) was not significantly changed, as compared to controls.

### Example 2

### Overexpression of YL ACBP in Yarrowia lipolytica Strain Y4305U1

[0218] The present Example describes the generation of pZP2-YACBP, comprising a chimeric FBAIN::YL ACBP::PEX20 gene. This plasmid was then transformed into Yarrowia lipolytica strain Y4305U1 to determine the results of overexpression of the ACBP gene. Increased fatty acid content and modification of the relative abundance of each fatty acid species was observed.

### Generation of Plasmid PZP2-YACBP

[0219] Oligonucleotides YACBP-F (SEQ ID NO:24) and YACBP-R (SEQ ID NO:25) were designed and synthesized to allow amplification of the ACBP ORF from Yarrowia lipolytica genomic DNA (isolated from strain ATCC #20362).

[0220] The PCR reactions, with Y. lipolytica genomic DNA as template, were individually carried out in a 50 μl total volume comprising: 1 μl each of 20 μM forward and reverse primers, 1 μl genomic DNA (100 ng), 22 μl water and 25 μl 2× premix of ExTaq Taq polymerase (TaKaRa Bio Inc., Otsu, Shiga, 520-2193, Japan). Amplification was carried out at 94° C. for 1 min, followed by 30 cycles at 94° C. for 20 sec, 55° C. for 20 sec, and 72° C. for 20 sec, followed by a final elongation cycle at 72° C. for 5 min. A ˜250 bp DNA fragment was generated that contained the YL ACBP ORF. The PCR fragment was purified with a Qiagen PCR purification kit following the manufacturer's protocol. Purified DNA sample was digested with NcoI and NotI, and then purified with a Qiagen reaction clean-up kit.

[0221] Separately, vector pZP2-PEX10 (FIG. 4A; SEQ ID NO:26) was digested with NcoI and NotI, and the 7.6 kB fragment containing the vector backbone without the Yarrowia lipolytica PEX10 gene (encoding GenBank Accession No. CAG81606) was isolated by gel electrophoresis and purified with a Qiagen Gel purification kit.

[0222] The YL ACBP fragment was directionally ligated with the pZP2-PEX10 vector (SEQ ID NO:26). Specifically, the ligation reaction contained: 10 μl 2× ligation buffer, 1 μl T4 DNA ligase (Promega), 4 μl (˜300 ng) of the 250 bp PCR fragment containing the YL ACBP ORF, and 1 μl of the 7.6 kB fragment from pZP2-PEX10 (˜150 ng). The reaction mixtures were incubated at room temperature for 2 hrs and used to transform E. coli Top10 competent cells (Invitrogen). Plasmid DNA from transformants was recovered using a Qiagen Miniprep kit. Correct clones were identified by restriction mapping and the final construct was designated “pZP2-YACBP”.

[0223] Thus, pZP2-YACBP (FIG. 4B) thereby contained the following components:

TABLE 5
Components Of Plasmid pZP2-YACBP (SEQ ID NO: 27)

| RE Sites And | |
|---|---|
| Nucleotides | |
| Within SEQ ID | Description Of Fragment And |
| NO: 27 | Chimeric Gene Components |
| BglII-BsiWI | FBAIN::YL ACBP::PEX20, comprising: |
| (6681-301) | FBAIN: Yarrowia lipolytica FBAIN promoter (U.S. |
| | Pat. No. 7,202,356); |
| | YL ACBP: Yarrowia lipolytica acb1 gene (SEQ ID |
| | NO: 1; labeled as “YACBP” in Figure;) |
| | Pex20: Pex20 terminator sequence of Yarrowia |
| | Pex20 gene (GenBank Accession No. AF054613) |
| (4494-5981) | Yarrowia URA3 (GenBank Accession No. AJ306421) |
| ApaI-PacI | 3′-noncoding region of Yarrowia Pox2 gene |
| (3836-4493) | (GenBank Accession No. AJ001300) |
| (2116-2976) | ampicillin-resistance gene (Amp^{R}) for selection |
| | in E. coli |
| (318-1127) | 5′-noncoding region of Yarrowia Pox2 gene |
| | (GenBank Accession No. AJ001300) |

Functional Analysis of Yarrowia lipolytica Strain Y4305U1 Transformants Overexpressing YL ACBP

[0224] A clone of ZP2-YACBP was transformed into Yarrowia-lipolytica strain Y4305U1, as described in the General Methods (non-transformed cells of Yarrowia lipolytica strain Y4305 served as the control). The transformants were selected onto MM plates.

[0225] The cells from each transformation were plated onto MM plates and maintained at 30° C. for 2 days. Three transformants from each transformation plate were used to inoculate individual 25 mL cultures with MM medium. Each culture was allowed to grow for 2 days at 30° C., then switched into 25 mL of HGM and allowed to grow for 5 days at 30° C.

[0226] The cells were collected by centrifugation, total lipids were extracted, and fatty acid methyl esters [“FAMEs”] were prepared by trans-esterification, and subsequently analyzed with a Hewlett-Packard 6890 GC.

[0227] Based on the above analyses, lipid content and composition was determined in one transformant (i.e. #6) of Y4305U1 transformed with pZP2-YACBP, and the control strain of Y4305 respectively, as shown below in Table 6. Two cultures of each strain were analyzed, while the average results are shown in the rows highlighted in grey.

[0228] Specifically, the total lipid content of cells [“TFAs % DCW”], the concentration of EPA as a weight percent of TFAs [“EPA % TFAs”] and the EPA content as a percent of the dry cell weight [“EPA % DCW”] and compared in Table 6.

[0229] DCW was determined by collecting cells from 10 mL of culture via centrifugation, washing the cells with water once to remove residue medium, drying the cells in a vacuum oven at 80° C. overnight, and weighing the dried cells.

TABLE 6
Lipid Content And Composition In Yarrowia
Strain Y4305 Overexpressing YL ACBP

| | | TFAs % | EPA % | EPA % |
|---|---|---|---|---|
| Sample | Strain | DCW | TFAs | DCW |
| 1 | Y4305 | 29.61 | 52.13 | 15.44 |
| 2 | Y4305 | 29.75 | 52.51 | 15.62 |
| Avg. | | 29.68 | 52.32 | 15.53 |
| 3 | Transformant #6 of Y4305U1 + | 32.02 | 50.23 | 16.08 |
| | pZP2-YACBP | | | |
| 4 | Transformant #6 of Y4305U1 + | 32.22 | 50.43 | 16.25 |
| | pZP2-YACBP | | | |
| Avg. | | 32.12 | 50.33 | 16.17 |

[0230] GC analyses showed that there was an ˜8.2% increase in TFAs % DCW in Y4305U1 cells carrying pZP2-YACBP, as compared to the control cells. Furthermore, there was also an increase in EPA % DCW.

### Example 3

### Co-Expression of YL ACBP With YL DGAT In Yarrowia lipolytica Strain Y4305U

[0231] The present example describes co-expression of the Yarrowia acyl-CoA binding protein homolog (YL ACBP) with either plasmid pFBAIN-YDGAT1 (comprising the Y. lipolytica DGAT10RF) or plasmid pFBAIN-YDGAT2 (comprising the Y. lipolytica DGAT2 ORF).

[0232] Vectors pFBAIN-YDGAT1 (SEQ ID NO:33) and pFBAIN-YDGAT2 (SEQ ID NO:34), comprising a chimeric FBAINm::YL DGAT1::PEX20 gene and a chimeric FBAINm::YL DGAT2::PEX20 gene, respectively, are described in International Publication No. WO 2008/147935.

[0233] In order to disrupt the Ura3 gene in transformant #6 of Y4305U1+pZP2-YACBP (Example 2), construct pZKUM (SEQ ID NO:35; described in Table 15 of U.S. Pat. Appl. Pub. No. 2009-0093543-A1) will be used to integrate a Ura3 mutant gene into the Ura3 gene of transformant #6 of Y4305U1+pZP2-YACBP. Transformants will be grown on MM+5-FOA plates, picked and re-streaked onto MM plates and MM+5-FOA plates, separately. Strains having a Ura-phenotype (i.e., cells could grow on MM+5-FOA plates, but not on MM plates) will be selected.

[0234] Those strains having a Ura-phenotype, which are derived from Y. lipolytica strain Y4305U1 and are over-expressing YL ACBP, will then be transformed with one of the following: plasmid pFBAIn-YDGAT1 (SEQ ID NO:33; comprising the Y. lipolytica DGAT10RF), plasmid pFBAIN-YDGAT2 (SEQ ID NO:34; comprising the Y. lipolytica DGAT2 ORF), or pFBAIn-MOD-1 (SEQ ID NO:32; a “control” vector).

[0235] Transformants will be grown in FM medium for 2 days, followed by HGM medium for 5 days. The cells will be collected by centrifugation, and lipids will be extracted. Fatty acid methyl esters will be prepared by trans-esterification and subsequently analyzed with a Hewlett-Packard 6890 GC.

[0236] Since DGAT1 and DGAT2 catalyze the last step of TAG biosynthesis (i.e., the incorporation of acyl-CoA into DAG to form TAG with the release of the CoA moiety) and since YL ACBP can bind to acyl-CoA molecules and increase their intracellular concentration, co-expression of YL ACBP and either YL DGAT1 or YL DGAT2 is expected to lead to a synergistic effect that will be greater than that achieved by overexpression of either ACBP or DGAT.

What is claimed is:

1. An oleaginous microbial organism, comprising:
(i) a recombinant construct comprising at least one isolated polynucleotide comprising a nucleic acid sequence encoding an acyl-CoA binding protein operably linked to at least one regulatory sequence; and
(ii) a source of fatty acids.

2. An oleaginous microbial organism, comprising:
(i) a disruption in a native gene encoding an acyl-CoA binding protein; and
(ii) a source of fatty acids.

3. The oleaginous microbial organism of either claim 1 or claim 2, selected from the group consisting of Yarrowia, Candida, Rhodotorula, Rhodosporidium, Cryptococcus, Trichosporon and Lipomyces.

4. The oleaginous microbial organism of claim 3 wherein the organism accumulates at least about 25% of its dry cell weight as oil.

5. The oleaginous microbial organism of claim 3 wherein the organism is Yarrowia lipolytica.

6. The oleaginous microbial organism of claim 1 comprising a recombinant construct having at least one nucleic acid sequence encoding a diacylglycerol acyltransferase selected from the group consisting of DGAT1, DGAT2 and DGAT1 in combination with DGAT2.

7. A method for modifying total lipid content in an oleaginous microbial organism, comprising:
a) providing an oleaginous microbial organism, comprising:
(i) a recombinant construct comprising at least one isolated polynucleotide comprising a nucleic acid sequence encoding an acyl-CoA binding protein operably linked to at least one regulatory sequence; and
(ii) a source of fatty acids;
b) growing the cell of step (a) under conditions whereby transfer of the fatty acids to lipid fractions of the organism is altered by altering expression of the isolated polynucleotide comprising a nucleic acid sequence encoding an acyl-CoA binding protein; and
c) optionally recovering the total lipid fractions of step (b).

8. The method of claim 7 wherein the alteration is overexpression of acyl-CoA binding protein.

9. The method of claim 7 wherein the alteration is disruption of acyl-CoA binding protein.

10. The method of claim 7 wherein oleaginous microbial organism further comprises a recombinant construct having at least one nucleic acid sequence encoding a diacylglycerol acyltransferase selected from the group consisting of DGAT1, DGAT2 and DGAT1 in combination with DGAT2.

11. The method of claim 7, wherein the oleaginous yeast is selected from the group consisting of: Yarrowia, Candida, Rhodotorula, Rhodosporidium, Cryptococcus, Trichosporon and Lipomyces.

12. A method for modifying fatty acid composition in an oleaginous microbial organism, comprising:
(a) providing an oleaginous microbial organism, comprising:
(i) a recombinant construct comprising at least one isolated polynucleotide comprising a nucleic acid sequence encoding an acyl-CoA binding protein operably linked to at least one regulatory sequence; and
(ii) a functional ω-3/ω-6 fatty acid biosynthetic pathway comprising at least one isolated polynucleotide comprising a nucleic acid sequence encoding a desaturase enzyme for biosynthesis of fatty acids;
(b) growing the cell of step (a) under conditions whereby the expression of the acyl-CoA binding protein is altered, resulting in an altered rate of desaturation by the at least one desaturase enzyme and an altered transfer of the synthesized fatty acids to lipid fractions of the organism;
(c) optionally recovering the lipid fractions of step (b); and,
(d) optionally determining the modified fatty acid composition of the lipid fractions of step (c).

13. The method of claim 12, wherein expression of the at least one isolated polynucleotide comprising a nucleic acid sequence encoding an acyl-CoA binding protein is decreased, thereby resulting in an increased rate of desaturation by the at least one desaturase enzyme, increased production of polyunsaturated fatty acids as a percent of the total fatty acids, and decreased total lipid content in the oleaginous microbial organism.

14. The method of claim 12, wherein the expression of the at least one isolated polynucleotide comprising a nucleic acid sequence encoding an acyl-CoA binding protein is increased, thereby resulting in a decreased rate of desaturation by the at least one desaturase enzyme, decreased production of polyunsaturated fatty acids as a percent of the total fatty acids, and increased total lipid content in the oleaginous microbial organism.

15. The method of either claim 7 or claim 12, wherein said acyl-CoA binding protein comprises the following amino acid sequence motifs: SEQ ID NO:36, SEQ ID NO:37 and SEQ ID NO:38.

16. A method for increasing the total lipid content in a Yarrowia sp., comprising:
a) providing Yarrowia sp., comprising:
i) a recombinant construct comprising at least one isolated polynucleotide comprising a nucleic acid sequence encoding an acyl-CoA binding protein, said protein selected from the group consisting of:
(a) a protein consisting essentially of the sequence set forth in SEQ ID NO:2; and
(b) a protein comprising the following amino acid sequence motifs: SEQ ID NO:36, SEQ ID NO:37 and SEQ ID NO:38;
wherein said isolated polynucleotide is operably linked to at least one regulatory sequence; and
b) a source of fatty acids;
c) growing the Yarrowia sp. of step (a) under conditions whereby the expression of the acyl-CoA binding protein results in an increased total lipid content of at least 5% when compared to the total lipid content of a Yarrowia sp. lacking said recombinant construct; and,
d) optionally recovering the total lipids of step (b).

17. The method of claim 16, wherein the fatty acids of step (b) are endogenously produced by expression of a functional ω-3/ω-6 fatty acid biosynthetic pathway.

18. The method of claim 17, wherein said fatty acids comprise at least one polyunsaturated fatty acid selected from the group consisting of: linoleic acid, conjugated linoleic acid, γ-linolenic acid, dihomo-γ-linolenic acid, arachidonic acid, α-linolenic acid, stearidonic acid, eicosatetraenoic acid, eicosapentaenoic acid, ω-6 docosapentaenoic acid, ω-3 docosapentaenoic acid, eicosadienoic acid, eicosatrienoic acid, docosatetraenoic acid, docosahexaenoic acid, and hydroxylated or expoxy fatty acids thereof.

19. The method of claim 16 wherein said Yarrowia sp. comprises a recombinant construct having at least one DAG AT sequence selected from the group consisting of:
a) a DGAT1 enzyme consisting essentially of the sequence set forth in SEQ ID NO:4;
b) a DGAT2 enzyme consisting essentially of a sequence selected from the group consisting of SEQ ID NO:6, SEQ ID NO:8, SEQ ID NO:9, SEQ ID NO:10 and SEQ ID NO:11; and,
c) a DGAT1 as described in part (a) in combination with DGAT2 as described in part (b).

The application's sequence listing, which the Patent Office published only in electronic form, follows.

SEQUENCE LISTING (255 sequences)

SEQ ID NO: 1 - DNA, 1581 bp, Yarrowia lipoytica
  ref <302>: TITLE: DIACYLGLYCEROL ACYLTRANSFERASES FOR ALTERATION OF POLYUNSATURATED FATTY ACIDS AND OIL CONTENT IN OLEAGINOUS ORGANISMS
  ref <310>: PATENT DOCUMENT NUMBER: U.S. Patent 7,273,746
  ref <311>: PATENT FILING DATE: 2004-12-29
  ref <312>: PUBLICATION DATE: 2006-05-04
  ref <313>: RELEVANT RESIDUES IN SEQ ID NO: (1)..(1581)
  ref <302>: TITLE: DIACYLGLYCEROL ACYLTRANSFERASES FOR ALTERATION OF POLYUNSATURATED FATTY ACIDS AND OIL CONTENT IN OLEAGINOUS ORGANISMS
  ref <310>: PATENT DOCUMENT NUMBER: PCT Publication No. WO 2006/053924
  ref <311>: PATENT FILING DATE: 2005-11-03
  ref <312>: PUBLICATION DATE: 2006-05-18
  ref <313>: RELEVANT RESIDUES IN SEQ ID NO: (1)..(1581)
atggaggtccgacgacgaaagatagacgtgctcaaggcccagaaaaacggctacgaatcgggcccaccatctcgacaatcgtcgcagccctcctcaagagcatcgtccagaacccgcaacaaacactcctcgtccaccctgtcgctcagcggactgaccatgaaagtccagaagaaacctgcgggacccccggcgaactccaaaacgccattcctacacatcaagcccgtgcacacgtgctgctccacatcaatgctttcgcgcgattatgacggctccaaccccagcttcaagggcttcaaaaacatcggcatgatcattctcattgtgggaaatctacggctcgcattcgaaaactacctcaaatacggcatttccaacccgttcttcgaccccaaaattactccttccgagtggcagctctcaggcttgctcatagtcgtggcctacgcacatatcctcatggcctacgctattgagagcgctgccaagctgctgttcctctctagcaaacaccactacatggccgtggggcttctgcataccatgaacactttgtcgtccatctcgttgctgtcctacgtcgtctactactacctgcccaaccccgtggcaggcacaatagtcgagtttgtggccgttattctgtctctcaaactcgcctcatacgccctcactaactcggatctccgaaaagccgcaattcatgcccagaagctcgacaagacgcaagacgataacgaaaaggaatccacctcgtcttcctcttcttcagatgacgcagagactttggcagacattgacgtcattcctgcatactacgcacagctgccctacccccagaatgtgacgctgtcgaacctgctgtacttctggtttgctcccacactggtctaccagcccgtgtaccccaagacggagcgtattcgacccaagcacgtgatccgaaacctgtttgagctcgtctctctgtgcatgcttattcagtttctcatcttccagtacgcctaccccatcatgcagtcgtgtctggctctgttcttccagcccaagctcgattatgccaacatctccgagcgcctcatgaagttggcctccgtgtctatgatggtctggctcattggattctacgctttcttccagaacggtctcaatcttattgccgagctcacctgttttggaaacagaaccttctaccagcagtggtggaattcccgctccattggccagtactggactctatggaacaagccagtcaaccagtactttagacaccacgtctacgtgcctcttctcgctcggggcatgtcgcggttcaatgcgtcggtggtggttttctttttctccgccgtcatccatgaactgcttgtcggcatccccactcacaacatcatcggagccgccttcttcggcatgatgtcgcaggtgcctctgatcatggctactgagaaccttcagcatattaactcctctctgggccccttccttggcaactgtgcattctggttcacctttttcctgggacaacccacttgtgcattcctttactatttggcctacaactacaagcagaaccagtag

SEQ ID NO: 2 - DNA, 8325 bp, Artificial Sequence
  Plasmid pYDA1
aaacggtaggttagtgcttggtatatgagttgtaggcatgacaatttggaaaggggtggactttgggaatattgtgggatttcaataccttagtttgtacagggtaattgttacaaatgatacaaagaactgtatttcttttcatttgttttaattggttgtatatcaagtccgttagacgagctcagtgccttggcttttggcactgtatttcatttttagaggtacactacattcagtgaggtatggtaaggttgagggcataatgaaggcaccttgtactgacagtcacagacctctcaccgagaattttatgagatatactcgggttcattttaggctcatcgatcaggagagaccgggttggcggcgtatttgtgtcccaaaaaacagccccaattgccccaattgaccccaaattgacccagtagcgggcccaaccccggcgagagcccccttcaccccacatatcaaacctcccccggttcccacacttgccgttaagggcgtagggtactgcagtctggaatctacgcttgttcagactttgtactagtttctttgtctggccatccgggtaacccatgccggacgcaaaatagactactgaaaatttttttgctttgtggttgggactttagccaagggtataaaagaccaccgtccccgaattacctttcctcttcttttctctctctccttgtcaactcacacccgaaatcgttaagcatttccttctgagtataagaatcattcaccatggaggtccgacgacgaaagatagacgtgctcaaggcccagaaaaacggctacgaatcgggcccaccatctcgacaatcgtcgcagccctcctcaagagcatcgtccagaacccgcaacaaacactcctcgtccaccctgtcgctcagcggactgaccatgaaagtccagaagaaacctgcgggacccccggcgaactccaaaacgccattcctacacatcaagcccgtgcacacgtgctgctccacatcaatgctttcgcgcgattatgacggctccaaccccagcttcaagggcttcaaaaacatcggcatgatcattctcattgtgggaaatctacggctcgcattcgaaaactacctcaaatacggcatttccaacccgttcttcgaccccaaaattactccttccgagtggcagctctcaggcttgctcatagtcgtggcctacgcacatatcctcatggcctacgctattgagagcgctgccaagctgctgttcctctctagcaaacaccactacatggccgtggggcttctgcataccatgaacactttgtcgtccatctcgttgctgtcctacgtcgtctactactacctgcccaaccccgtggcaggcacaatagtcgagtttgtggccgttattctgtctctcaaactcgcctcatacgccctcactaactcggatctccgaaaagccgcaattcatgcccagaagctcgacaagacgcaagacgataacgaaaaggaatccacctcgtcttcctcttcttcagatgacgcagagactttggcagacattgacgtcattcctgcatactacgcacagctgccctacccccagaatgtgacgctgtcgaacctgctgtacttctggtttgctcccacactggtctaccagcccgtgtaccccaagacggagcgtattcgacccaagcacgtgatccgaaacctgtttgagctcgtctctctgtgcatgcttattcagtttctcatcttccagtacgcctaccccatcatgcagtcgtgtctggctctgttcttccagcccaagctcgattatgccaacatctccgagcgcctcatgaagttggcctccgtgtctatgatggtctggctcattggattctacgctttcttccagaacggtctcaatcttattgccgagctcacctgttttggaaacagaaccttctaccagcagtggtggaattcccgctccattggccagtactggactctatggaacaagccagtcaaccagtactttagacaccacgtctacgtgcctcttctcgctcggggcatgtcgcggttcaatgcgtcggtggtggttttctttttctccgccgtcatccatgaactgcttgtcggcatccccactcacaacatcatcggagccgccttcttcggcatgatgtcgcaggtgcctctgatcatggctactgagaaccttcagcatattaactcctctctgggccccttccttggcaactgtgcattctggttcacctttttcctgggacaacccacttgtgcattcctttactatttggcctacaactacaagcagaaccagtagcggccgcaagtgtggatggggaagtgagtgcccggttctgtgtgcacaattggcaatccaagatggatggattcaacacagggatatagcgagctacgtggtggtgcgaggatatagcaacggatatttatgtttgacacttgagaatgtacgatacaagcactgtccaagtacaatactaaacatactgtacatactcatactcgtacccgggcaacggtttcacttgagtgcagtggctagtgctcttactcgtacagtgtgcaatactgcgtatcatagtctttgatgtatatcgtattcattcatgttagttgcgtacgggcgtcgttgcttgtgtgatttttgaggacccatccctttggtatataagtatactctggggttaaggttgcccgtgtagtctaggttatagttttcatgtgaaataccgagagccgagggagaataaacgggggtatttggacttgtttttttcgcggaaaagcgtcgaatcaaccctgcgggccttgcaccatgtccacgacgtgtttctcgccccaattcgccccttgcacgtcaaaattaggcctccatctagacccctccataacatgtgactgtggggaaaagtataagggaaaccatgcaaccatagacgacgtgaaagacggggaggaaccaatggaggccaaagaaatggggtagcaacagtccaggagacagacaaggagacaaggagagggcgcccgaaagatcggaaaaacaaacatgtccaattggggcagtgacggaaacgacacggacacttcagtacaatggaccgaccatctccaagccagggttattccggtatcaccttggccgtaacctcccgctggtacctgatattgtacacgttcacattcaatatactttcagctacaataagagaggctgtttgtcgggcatgtgtgtccgtcgtatggggtgatgtccgagggcgaaattcgctacaagcttaactctggcgcttgtccagtatgaatagacaagtcaagaccagtggtgccatgattgacagggaggtacaagacttcgatactcgagcattactcggacttgtggcgattgaacagacgggcgatcgcttctcccccgtattgccggcgcgccagctgcattaatgaatcggccaacgcgcggggagaggcggtttgcgtattgggcgctcttccgcttcctcgctcactgactcgctgcgctcggtcgttcggctgcggcgagcggtatcagctcactcaaaggcggtaatacggttatccacagaatcaggggataacgcaggaaagaacatgtgagcaaaaggccagcaaaaggccaggaaccgtaaaaaggccgcgttgctggcgtttttccataggctccgcccccctgacgagcatcacaaaaatcgacgctcaagtcagaggtggcgaaacccgacaggactataaagataccaggcgtttccccctggaagctccctcgtgcgctctcctgttccgaccctgccgcttaccggatacctgtccgcctttctcccttcgggaagcgtggcgctttctcatagctcacgctgtaggtatctcagttcggtgtaggtcgttcgctccaagctgggctgtgtgcacgaaccccccgttcagcccgaccgctgcgccttatccggtaactatcgtcttgagtccaacccggtaagacacgacttatcgccactggcagcagccactggtaacaggattagcagagcgaggtatgtaggcggtgctacagagttcttgaagtggtggcctaactacggctacactagaagaacagtatttggtatctgcgctctgctgaagccagttaccttcggaaaaagagttggtagctcttgatccggcaaacaaaccaccgctggtagcggtggtttttttgtttgcaagcagcagattacgcgcagaaaaaaaggatctcaagaagatcctttgatcttttctacggggtctgacgctcagtggaacgaaaactcacgttaagggattttggtcatgagattatcaaaaaggatcttcacctagatccttttaaattaaaaatgaagttttaaatcaatctaaagtatatatgagtaaacttggtctgacagttaccaatgcttaatcagtgaggcacctatctcagcgatctgtctatttcgttcatccatagttgcctgactccccgtcgtgtagataactacgatacgggagggcttaccatctggccccagtgctgcaatgataccgcgagacccacgctcaccggctccagatttatcagcaataaaccagccagccggaagggccgagcgcagaagtggtcctgcaactttatccgcctccatccagtctattaattgttgccgggaagctagagtaagtagttcgccagttaatagtttgcgcaacgttgttgccattgctacaggcatcgtggtgtcacgctcgtcgtttggtatggcttcattcagctccggttcccaacgatcaaggcgagttacatgatcccccatgttgtgcaaaaaagcggttagctccttcggtcctccgatcgttgtcagaagtaagttggccgcagtgttatcactcatggttatggcagcactgcataattctcttactgtcatgccatccgtaagatgcttttctgtgactggtgagtactcaaccaagtcattctgagaatagtgtatgcggcgaccgagttgctcttgcccggcgtcaatacgggataataccgcgccacatagcagaactttaaaagtgctcatcattggaaaacgttcttcggggcgaaaactctcaaggatcttaccgctgttgagatccagttcgatgtaacccactcgtgcacccaactgatcttcagcatcttttactttcaccagcgtttctgggtgagcaaaaacaggaaggcaaaatgccgcaaaaaagggaataagggcgacacggaaatgttgaatactcatactcttcctttttcaatattattgaagcatttatcagggttattgtctcatgagcggatacatatttgaatgtatttagaaaaataaacaaataggggttccgcgcacatttccccgaaaagtgccacctgatgcggtgtgaaataccgcacagatgcgtaaggagaaaataccgcatcaggaaattgtaagcgttaatattttgttaaaattcgcgttaaatttttgttaaatcagctcattttttaaccaataggccgaaatcggcaaaatcccttataaatcaaaagaatagaccgagatagggttgagtgttgttccagtttggaacaagagtccactattaaagaacgtggactccaacgtcaaagggcgaaaaaccgtctatcagggcgatggcccactacgtgaaccatcaccctaatcaagttttttggggtcgaggtgccgtaaagcactaaatcggaaccctaaagggagcccccgatttagagcttgacggggaaagccggcgaacgtggcgagaaaggaagggaagaaagcgaaaggagcgggcgctagggcgctggcaagtgtagcggtcacgctgcgcgtaaccaccacacccgccgcgcttaatgcgccgctacagggcgcgtccattcgccattcaggctgcgcaactgttgggaagggcgatcggtgcgggcctcttcgctattacgccagctggcgaaagggggatgtgctgcaaggcgattaagttgggtaacgccagggttttcccagtcacgacgttgtaaaacgacggccagtgaattgtaatacgactcactatagggcgaattgggcccgacgtcgcatgcgctgatgacactttggtctgaaagagatgcattttgaatcccaaacttgcagtgcccaagtgacatacatctccgcgttttggaaaatgttcagaaacagttgattgtgttggaatggggaatggggaatggaaaaatgactcaagtatcaattccaaaaacttctctggctggcagtacctactgtccatactactgcattttctccagtcaggccactctatactcgacgacacagtagtaaaacccagataatttcgacataaacaagaaaacagacccaataatatttatatatagtcagccgtttgtccagttcagactgtaatagccgaaaaaaaatccaaagtttctattctaggaaaatatattccaatatttttaattcttaatctcatttattttattctagcgaaatacatttcagctacttgagacatgtgatacccacaaatcggattcggactcggttgttcagaagagcatatggcattcgtgctcgcttgttcacgtattcttcctgttccatctcttggccgacaatcacacaaaaatggggttttttttttaattctaatgattcattacagcaaaattgagatatagcagaccacgtattccataatcaccaaggaagttcttgggcgtcttaattaagtcatacacaagtcagctttcttcgagcctcatataagtataagtagttcaacgtattagcactgtacccagcatctccgtatcgagaaacacaacaacatgccccattggacagatcatgcggatacacaggttgtgcagtatcatacatactcgatcagacaggtcgtctgaccatcatacaagctgaacaagcgctccatacttgcacgctctctatatacacagttaaattacatatccatagtctaacctctaacagttaatcttctggtaagcctcccagccagccttctggtatcgcttggcctcctcaataggatctcggttctggccgtacagacctcggccgacaattatgatatccgttccggtagacatgacatcctcaacagttcggtactgctgtccgagagcgtctcccttgtcgtcaagacccaccccgggggtcagaataagccagtcctcagagtcgcccttaggtcggttctgggcaatgaagccaaccacaaactcggggtcggatcgggcaagctcaatggtctgcttggagtactcgccagtggccagagagcccttgcaagacagctcggccagcatgagcagacctctggccagcttctcgttgggagaggggactaggaactccttgtactgggagttctcgtagtcagagacgtcctccttcttctgttcagagacagtttcctcggcaccagctcgcaggccagcaatgattccggttccgggtacaccgtgggcgttggtgatatcggaccactcggcgattcggtgacaccggtactggtgcttgacagtgttgccaatatctgcgaactttctgtcctcgaacaggaagaaaccgtgcttaagagcaagttccttgagggggagcacagtgccggcgtaggtgaagtcgtcaatgatgtcgatatgggttttgatcatgcacacataaggtccgaccttatcggcaagctcaatgagctccttggtggtggtaacatccagagaagcacacaggttggttttcttggctgccacgagcttgagcactcgagcggcaaaggcggacttgtggacgttagctcgagcttcgtaggagggcattttggtggtgaagaggagactgaaataaatttagtctgcagaactttttatcggaaccttatctggggcagtgaagtatatgttatggtaatagttacgagttagttgaacttatagatagactggactatacggctatcggtccaaattagaaagaacgtcaatggctctctgggcgtcgcctttgccgacaaaaatgtgatcatgatgaaagccagcaatgacgttgcagctgatattgttgtcggccaaccgcgccgaaaacgcagctgtcagacccacagcctccaacgaagaatgtatcgtcaaagtgatccaagcacactcatagttggagtcgtactccaaaggcggcaatgacgagtcagacagatactcgtc

SEQ ID NO: 3 - DNA, 7518 bp, Artificial Sequence
  Plasmid pY75
ggccgcagggcggatcccccgggctgcaggaattcgatatcaagcttatcgataccgtcgacctcgagggggggcccggtacccaattcgccctatagtgagtcgtattacgcgcgctcactggccgtcgttttacaacgtcgtgactgggaaaaccctggcgttacccaacttaatcgccttgcagcacatccccctttcgccagctggcgtaatagcgaagaggcccgcaccgatcgcccttcccaacagttgcgcagcctgaatggcgaatggcgcgacgcgccctgtagcggcgcattaagcgcggcgggtgtggtggttacgcgcagcgtgaccgctacacttgccagcgccctagcgcccgctcctttcgctttcttcccttcctttctcgccacgttcgccggctttccccgtcaagctctaaatcgggggctccctttagggttccgatttagtgctttacggcacctcgaccccaaaaaacttgattagggtgatggttcacgtagtgggccatcgccctgatagacggtttttcgccctttgacgttggagtccacgttctttaatagtggactcttgttccaaactggaacaacactcaaccctatctcggtctattcttttgatttataagggattttgccgatttcggcctattggttaaaaaatgagctgatttaacaaaaatttaacgcgaattttaacaaaatattaacgtttacaatttcctgatgcggtattttctccttacgcatctgtgcggtatttcacaccgcatatcgacggtcgaggagaacttctagtatatccacatacctaatattattgccttattaaaaatggaatcccaacaattacatcaaaatccacattctcttcaaaatcaattgtcctgtacttccttgttcatgtgtgttcaaaaacgttatatttataggataattatactctatttctcaacaagtaattggttgtttggccgagcggtctaaggcgcctgattcaagaaatatcttgaccgcagttaactgtgggaatactcaggtatcgtaagatgcaagagttcgaatctcttagcaaccattatttttttcctcaacataacgagaacacacaggggcgctatcgcacagaatcaaattcgatgactggaaattttttgttaatttcagaggtcgcctgacgcatatacctttttcaactgaaaaattgggagaaaaaggaaaggtgagaggccggaaccggcttttcatatagaatagagaagcgttcatgactaaatgcttgcatcacaatacttgaagttgacaatattatttaaggacctattgttttttccaataggtggttagcaatcgtcttactttctaacttttcttaccttttacatttcagcaatatatatatatatttcaaggatataccattctaatgtctgcccctatgtctgcccctaagaagatcgtcgttttgccaggtgaccacgttggtcaagaaatcacagccgaagccattaaggttcttaaagctatttctgatgttcgttccaatgtcaagttcgatttcgaaaatcatttaattggtggtgctgctatcgatgctacaggtgtcccacttccagatgaggcgctggaagcctccaagaaggttgatgccgttttgttaggtgctgtggctggtcctaaatggggtaccggtagtgttagacctgaacaaggtttactaaaaatccgtaaagaacttcaattgtacgccaacttaagaccatgtaactttgcatccgactctcttttagacttatctccaatcaagccacaatttgctaaaggtactgacttcgttgttgtcagagaattagtgggaggtatttactttggtaagagaaaggaagacgatggtgatggtgtcgcttgggatagtgaacaatacaccgttccagaagtgcaaagaatcacaagaatggccgctttcatggccctacaacatgagccaccattgcctatttggtccttggataaagctaatcttttggcctcttcaagattatggagaaaaactgtggaggaaaccatcaagaacgaattccctacattgaaggttcaacatcaattgattgattctgccgccatgatcctagttaagaacccaacccacctaaatggtattataatcaccagcaacatgtttggtgatatcatctccgatgaagcctccgttatcccaggttccttgggtttgttgccatctgcgtccttggcctctttgccagacaagaacaccgcatttggtttgtacgaaccatgccacggttctgctccagatttgccaaagaataaggttgaccctatcgccactatcttgtctgctgcaatgatgttgaaattgtcattgaacttgcctgaagaaggtaaggccattgaagatgcagttaaaaaggttttggatgcaggtatcagaactggtgatttaggtggttccaacagtaccaccgaagtcggtgatgctgtcgccgaagaagttaagaaaatccttgcttaaaaagattctctttttttatgatatttgtacataaactttataaatgaaattcataatagaaacgacacgaaattacaaaatggaatatgttcatagggtagacgaaactatatacgcaatctacatacatttatcaagaaggagaaaaaggaggatagtaaaggaatacaggtaagcaaattgatactaatggctcaacgtgataaggaaaaagaattgcactttaacattaatattgacaaggaggagggcaccacacaaaaagttaggtgtaacagaaaatcatgaaactacgattcctaatttgatattggaggattttctctaaaaaaaaaaaaatacaacaaataaaaaacactcaatgacctgaccatttgatggagtttaagtcaataccttcttgaagcatttcccataatggtgaaagttccctcaagaattttactctgtcagaaacggccttacgacgtagtcgatatggtgcactctcagtacaatctgctctgatgccgcatagttaagccagccccgacacccgccaacacccgctgacgcgccctgacgggcttgtctgctcccggcatccgcttacagacaagctgtgaccgtctccgggagctgcatgtgtcagaggttttcaccgtcatcaccgaaacgcgcgagacgaaagggcctcgtgatacgcctatttttataggttaatgtcatgataataatggtttcttagtatgatccaatatcaaaggaaatgatagcattgaaggatgagactaatccaattgaggagtggcagcatatagaacagctaaagggtagtgctgaaggaagcatacgataccccgcatggaatgggataatatcacaggaggtactagactacctttcatcctacataaatagacgcatataagtacgcatttaagcataaacacgcactatgccgttcttctcatgtatatatatatacaggcaacacgcagatataggtgcgacgtgaacagtgagctgtatgtgcgcagctcgcgttgcattttcggaagcgctcgttttcggaaacgctttgaagttcctattccgaagttcctattctctagaaagtataggaacttcagagcgcttttgaaaaccaaaagcgctctgaagacgcactttcaaaaaaccaaaaacgcaccggactgtaacgagctactaaaatattgcgaataccgcttccacaaacattgctcaaaagtatctctttgctatatatctctgtgctatatccctatataacctacccatccacctttcgctccttgaacttgcatctaaactcgacctctacattttttatgtttatctctagtattactctttagacaaaaaaattgtagtaagaactattcatagagtgaatcgaaaacaatacgaaaatgtaaacatttcctatacgtagtatatagagacaaaatagaagaaaccgttcataattttctgaccaatgaagaatcatcaacgctatcactttctgttcacaaagtatgcgcaatccacatcggtatagaatataatcggggatgcctttatcttgaaaaaatgcacccgcagcttcgctagtaatcagtaaacgcgggaagtggagtcaggctttttttatggaagagaaaatagacaccaaagtagccttcttctaaccttaacggacctacagtgcaaaaagttatcaagagactgcattatagagcgcacaaaggagaaaaaaagtaatctaagatgctttgttagaaaaatagcgctctcgggatgcatttttgtagaacaaaaaagaagtatagattctttgttggtaaaatagcgctctcgcgttgcatttctgttctgtaaaaatgcagctcagattctttgtttgaaaaattagcgctctcgcgttgcatttttgttttacaaaaatgaagcacagattcttcgttggtaaaatagcgctttcgcgttgcatttctgttctgtaaaaatgcagctcagattctttgtttgaaaaattagcgctctcgcgttgcatttttgttctacaaaatgaagcacagatgcttcgttcaggtggcacttttcggggaaatgtgcgcggaacccctatttgtttatttttctaaatacattcaaatatgtatccgctcatgagacaataaccctgataaatgcttcaataatattgaaaaaggaagagtatgagtattcaacatttccgtgtcgcccttattcccttttttgcggcattttgccttcctgtttttgctcacccagaaacgctggtgaaagtaaaagatgctgaagatcagttgggtgcacgagtgggttacatcgaactggatctcaacagcggtaagatccttgagagttttcgccccgaagaacgttttccaatgatgagcacttttaaagttctgctatgtggcgcggtattatcccgtattgacgccgggcaagagcaactcggtcgccgcatacactattctcagaatgacttggttgagtactcaccagtcacagaaaagcatcttacggatggcatgacagtaagagaattatgcagtgctgccataaccatgagtgataacactgcggccaacttacttctgacaacgatcggaggaccgaaggagctaaccgcttttttgcacaacatgggggatcatgtaactcgccttgatcgttgggaaccggagctgaatgaagccataccaaacgacgagcgtgacaccacgatgcctgtagcaatggcaacaacgttgcgcaaactattaactggcgaactacttactctagcttcccggcaacaattaatagactggatggaggcggataaagttgcaggaccacttctgcgctcggcccttccggctggctggtttattgctgataaatctggagccggtgagcgtgggtctcgcggtatcattgcagcactggggccagatggtaagccctcccgtatcgtagttatctacacgacggggagtcaggcaactatggatgaacgaaatagacagatcgctgagataggtgcctcactgattaagcattggtaactgtcagaccaagtttactcatatatactttagattgatttaaaacttcatttttaatttaaaaggatctaggtgaagatcctttttgataatctcatgaccaaaatcccttaacgtgagttttcgttccactgagcgtcagaccccgtagaaaagatcaaaggatcttcttgagatcctttttttctgcgcgtaatctgctgcttgcaaacaaaaaaaccaccgctaccagcggtggtttgtttgccggatcaagagctaccaactctttttccgaaggtaactggcttcagcagagcgcagataccaaatactgtccttctagtgtagccgtagttaggccaccacttcaagaactctgtagcaccgcctacatacctcgctctgctaatcctgttaccagtggctgctgccagtggcgataagtcgtgtcttaccgggttggactcaagacgatagttaccggataaggcgcagcggtcgggctgaacggggggttcgtgcacacagcccagcttggagcgaacgacctacaccgaactgagatacctacagcgtgagctatgagaaagcgccacgcttcccgaagggagaaaggcggacaggtatccggtaagcggcagggtcggaacaggagagcgcacgagggagcttccagggggaaacgcctggtatctttatagtcctgtcgggtttcgccacctctgacttgagcgtcgatttttgtgatgctcgtcaggggggcggagcctatggaaaaacgccagcaacgcggcctttttacggttcctggccttttgctggccttttgctcacatgttctttcctgcgttatcccctgattctgtggataaccgtattaccgcctttgagtgagctgataccgctcgccgcagccgaacgaccgagcgcagcgagtcagtgagcgaggaagcggaagagcgcccaatacgcaaaccgcctctccccgcgcgttggccgattcattaatgcagctggcacgacaggtttcccgactggaaagcgggcagtgagcgcaacgcaattaatgtgagttacctcactcattaggcaccccaggctttacactttatgcttccggctcctatgttgtgtggaattgtgagcggataacaatttcacacaggaaacagctatgaccatgattacgccaagcgcgcaattaaccctcactaaagggaacaaaagctggagctccaccgcgggatttcgaaactaagttcttggtgttttaaaactaaaaaaaagactaactataaaagtagaatttaagaagtttaagaaatagatttacagaattacaatcaatacctaccgtctttatatacttattagtcaagtaggggaataatttcagggaactggtttcaaccttttttttcagctttttccaaatcagagagagcagaaggtaatagaaggtgtaagaaaatgagatagatacatgcgtgggtcaattgccttgtgtcatcatttactccaggcaggttgcatcactccattgaggttgtgcccgttttttgcctgtttgtgcccctgttctctgtagttgcgctaagagaatggacctatgaactgatggttggtgaagaaaacaatattttggtgctgggattctttttttttctggatgccagcttaaaaagcgggctccattatatttagtggatgccaggaataaactgttcacccagacacctacgatgttatatattctgtgtaacccgccccctattttgggcatgtacgggttacagcagaattaaaaggctaattttttgactaaataaagttaggaaaatcactactattaattatttacgtattctttgaaatggcagtattgataatgataaactcgaaatcactagtggatccgcccagc

SEQ ID NO: 4 - DNA, 9109 bp, Artificial Sequence
  Plasmid pY75 YLDGAT1
catggaggtccgacgacgaaagatagacgtgctcaaggcccagaaaaacggctacgaatcgggcccaccatctcgacaatcgtcgcagccctcctcaagagcatcgtccagaacccgcaacaaacactcctcgtccaccctgtcgctcagcggactgaccatgaaagtccagaagaaacctgcgggacccccggcgaactccaaaacgccattcctacacatcaagcccgtgcacacgtgctgctccacatcaatgctttcgcgcgattatgacggctccaaccccagcttcaagggcttcaaaaacatcggcatgatcattctcattgtgggaaatctacggctcgcattcgaaaactacctcaaatacggcatttccaacccgttcttcgaccccaaaattactccttccgagtggcagctctcaggcttgctcatagtcgtggcctacgcacatatcctcatggcctacgctattgagagcgctgccaagctgctgttcctctctagcaaacaccactacatggccgtggggcttctgcataccatgaacactttgtcgtccatctcgttgctgtcctacgtcgtctactactacctgcccaaccccgtggcaggcacaatagtcgagtttgtggccgttattctgtctctcaaactcgcctcatacgccctcactaactcggatctccgaaaagccgcaattcatgcccagaagctcgacaagacgcaagacgataacgaaaaggaatccacctcgtcttcctcttcttcagatgacgcagagactttggcagacattgacgtcattcctgcatactacgcacagctgccctacccccagaatgtgacgctgtcgaacctgctgtacttctggtttgctcccacactggtctaccagcccgtgtaccccaagacggagcgtattcgacccaagcacgtgatccgaaacctgtttgagctcgtctctctgtgcatgcttattcagtttctcatcttccagtacgcctaccccatcatgcagtcgtgtctggctctgttcttccagcccaagctcgattatgccaacatctccgagcgcctcatgaagttggcctccgtgtctatgatggtctggctcattggattctacgctttcttccagaacggtctcaatcttattgccgagctcacctgttttggaaacagaaccttctaccagcagtggtggaattcccgctccattggccagtactggactctatggaacaagccagtcaaccagtactttagacaccacgtctacgtgcctcttctcgctcggggcatgtcgcggttcaatgcgtcggtggtggttttctttttctccgccgtcatccatgaactgcttgtcggcatccccactcacaacatcatcggagccgccttcttcggcatgatgtcgcaggtgcctctgatcatggctactgagaaccttcagcatattaactcctctctgggccccttccttggcaactgtgcattctggttcacctttttcctgggacaacccacttgtgcattcctttactatttggcctacaactacaagcagaaccagtagcggccggccgcagggcggatcccccgggctgcaggaattcgatatcaagcttatcgataccgtcgacctcgagggggggcccggtacccaattcgccctatagtgagtcgtattacgcgcgctcactggccgtcgttttacaacgtcgtgactgggaaaaccctggcgttacccaacttaatcgccttgcagcacatccccctttcgccagctggcgtaatagcgaagaggcccgcaccgatcgcccttcccaacagttgcgcagcctgaatggcgaatggcgcgacgcgccctgtagcggcgcattaagcgcggcgggtgtggtggttacgcgcagcgtgaccgctacacttgccagcgccctagcgcccgctcctttcgctttcttcccttcctttctcgccacgttcgccggctttccccgtcaagctctaaatcgggggctccctttagggttccgatttagtgctttacggcacctcgaccccaaaaaacttgattagggtgatggttcacgtagtgggccatcgccctgatagacggtttttcgccctttgacgttggagtccacgttctttaatagtggactcttgttccaaactggaacaacactcaaccctatctcggtctattcttttgatttataagggattttgccgatttcggcctattggttaaaaaatgagctgatttaacaaaaatttaacgcgaattttaacaaaatattaacgtttacaatttcctgatgcggtattttctccttacgcatctgtgcggtatttcacaccgcatatcgacggtcgaggagaacttctagtatatccacatacctaatattattgccttattaaaaatggaatcccaacaattacatcaaaatccacattctcttcaaaatcaattgtcctgtacttccttgttcatgtgtgttcaaaaacgttatatttataggataattatactctatttctcaacaagtaattggttgtttggccgagcggtctaaggcgcctgattcaagaaatatcttgaccgcagttaactgtgggaatactcaggtatcgtaagatgcaagagttcgaatctcttagcaaccattatttttttcctcaacataacgagaacacacaggggcgctatcgcacagaatcaaattcgatgactggaaattttttgttaatttcagaggtcgcctgacgcatatacctttttcaactgaaaaattgggagaaaaaggaaaggtgagaggccggaaccggcttttcatatagaatagagaagcgttcatgactaaatgcttgcatcacaatacttgaagttgacaatattatttaaggacctattgttttttccaataggtggttagcaatcgtcttactttctaacttttcttaccttttacatttcagcaatatatatatatatttcaaggatataccattctaatgtctgcccctatgtctgcccctaagaagatcgtcgttttgccaggtgaccacgttggtcaagaaatcacagccgaagccattaaggttcttaaagctatttctgatgttcgttccaatgtcaagttcgatttcgaaaatcatttaattggtggtgctgctatcgatgctacaggtgtcccacttccagatgaggcgctggaagcctccaagaaggttgatgccgttttgttaggtgctgtggctggtcctaaatggggtaccggtagtgttagacctgaacaaggtttactaaaaatccgtaaagaacttcaattgtacgccaacttaagaccatgtaactttgcatccgactctcttttagacttatctccaatcaagccacaatttgctaaaggtactgacttcgttgttgtcagagaattagtgggaggtatttactttggtaagagaaaggaagacgatggtgatggtgtcgcttgggatagtgaacaatacaccgttccagaagtgcaaagaatcacaagaatggccgctttcatggccctacaacatgagccaccattgcctatttggtccttggataaagctaatcttttggcctcttcaagattatggagaaaaactgtggaggaaaccatcaagaacgaattccctacattgaaggttcaacatcaattgattgattctgccgccatgatcctagttaagaacccaacccacctaaatggtattataatcaccagcaacatgtttggtgatatcatctccgatgaagcctccgttatcccaggttccttgggtttgttgccatctgcgtccttggcctctttgccagacaagaacaccgcatttggtttgtacgaaccatgccacggttctgctccagatttgccaaagaataaggttgaccctatcgccactatcttgtctgctgcaatgatgttgaaattgtcattgaacttgcctgaagaaggtaaggccattgaagatgcagttaaaaaggttttggatgcaggtatcagaactggtgatttaggtggttccaacagtaccaccgaagtcggtgatgctgtcgccgaagaagttaagaaaatccttgcttaaaaagattctctttttttatgatatttgtacataaactttataaatgaaattcataatagaaacgacacgaaattacaaaatggaatatgttcatagggtagacgaaactatatacgcaatctacatacatttatcaagaaggagaaaaaggaggatagtaaaggaatacaggtaagcaaattgatactaatggctcaacgtgataaggaaaaagaattgcactttaacattaatattgacaaggaggagggcaccacacaaaaagttaggtgtaacagaaaatcatgaaactacgattcctaatttgatattggaggattttctctaaaaaaaaaaaaatacaacaaataaaaaacactcaatgacctgaccatttgatggagtttaagtcaataccttcttgaagcatttcccataatggtgaaagttccctcaagaattttactctgtcagaaacggccttacgacgtagtcgatatggtgcactctcagtacaatctgctctgatgccgcatagttaagccagccccgacacccgccaacacccgctgacgcgccctgacgggcttgtctgctcccggcatccgcttacagacaagctgtgaccgtctccgggagctgcatgtgtcagaggttttcaccgtcatcaccgaaacgcgcgagacgaaagggcctcgtgatacgcctatttttataggttaatgtcatgataataatggtttcttagtatgatccaatatcaaaggaaatgatagcattgaaggatgagactaatccaattgaggagtggcagcatatagaacagctaaagggtagtgctgaaggaagcatacgataccccgcatggaatgggataatatcacaggaggtactagactacctttcatcctacataaatagacgcatataagtacgcatttaagcataaacacgcactatgccgttcttctcatgtatatatatatacaggcaacacgcagatataggtgcgacgtgaacagtgagctgtatgtgcgcagctcgcgttgcattttcggaagcgctcgttttcggaaacgctttgaagttcctattccgaagttcctattctctagaaagtataggaacttcagagcgcttttgaaaaccaaaagcgctctgaagacgcactttcaaaaaaccaaaaacgcaccggactgtaacgagctactaaaatattgcgaataccgcttccacaaacattgctcaaaagtatctctttgctatatatctctgtgctatatccctatataacctacccatccacctttcgctccttgaacttgcatctaaactcgacctctacattttttatgtttatctctagtattactctttagacaaaaaaattgtagtaagaactattcatagagtgaatcgaaaacaatacgaaaatgtaaacatttcctatacgtagtatatagagacaaaatagaagaaaccgttcataattttctgaccaatgaagaatcatcaacgctatcactttctgttcacaaagtatgcgcaatccacatcggtatagaatataatcggggatgcctttatcttgaaaaaatgcacccgcagcttcgctagtaatcagtaaacgcgggaagtggagtcaggctttttttatggaagagaaaatagacaccaaagtagccttcttctaaccttaacggacctacagtgcaaaaagttatcaagagactgcattatagagcgcacaaaggagaaaaaaagtaatctaagatgctttgttagaaaaatagcgctctcgggatgcatttttgtagaacaaaaaagaagtatagattctttgttggtaaaatagcgctctcgcgttgcatttctgttctgtaaaaatgcagctcagattctttgtttgaaaaattagcgctctcgcgttgcatttttgttttacaaaaatgaagcacagattcttcgttggtaaaatagcgctttcgcgttgcatttctgttctgtaaaaatgcagctcagattctttgtttgaaaaattagcgctctcgcgttgcatttttgttctacaaaatgaagcacagatgcttcgttcaggtggcacttttcggggaaatgtgcgcggaacccctatttgtttatttttctaaatacattcaaatatgtatccgctcatgagacaataaccctgataaatgcttcaataatattgaaaaaggaagagtatgagtattcaacatttccgtgtcgcccttattcccttttttgcggcattttgccttcctgtttttgctcacccagaaacgctggtgaaagtaaaagatgctgaagatcagttgggtgcacgagtgggttacatcgaactggatctcaacagcggtaagatccttgagagttttcgccccgaagaacgttttccaatgatgagcacttttaaagttctgctatgtggcgcggtattatcccgtattgacgccgggcaagagcaactcggtcgccgcatacactattctcagaatgacttggttgagtactcaccagtcacagaaaagcatcttacggatggcatgacagtaagagaattatgcagtgctgccataaccatgagtgataacactgcggccaacttacttctgacaacgatcggaggaccgaaggagctaaccgcttttttgcacaacatgggggatcatgtaactcgccttgatcgttgggaaccggagctgaatgaagccataccaaacgacgagcgtgacaccacgatgcctgtagcaatggcaacaacgttgcgcaaactattaactggcgaactacttactctagcttcccggcaacaattaatagactggatggaggcggataaagttgcaggaccacttctgcgctcggcccttccggctggctggtttattgctgataaatctggagccggtgagcgtgggtctcgcggtatcattgcagcactggggccagatggtaagccctcccgtatcgtagttatctacacgacggggagtcaggcaactatggatgaacgaaatagacagatcgctgagataggtgcctcactgattaagcattggtaactgtcagaccaagtttactcatatatactttagattgatttaaaacttcatttttaatttaaaaggatctaggtgaagatcctttttgataatctcatgaccaaaatcccttaacgtgagttttcgttccactgagcgtcagaccccgtagaaaagatcaaaggatcttcttgagatcctttttttctgcgcgtaatctgctgcttgcaaacaaaaaaaccaccgctaccagcggtggtttgtttgccggatcaagagctaccaactctttttccgaaggtaactggcttcagcagagcgcagataccaaatactgtccttctagtgtagccgtagttaggccaccacttcaagaactctgtagcaccgcctacatacctcgctctgctaatcctgttaccagtggctgctgccagtggcgataagtcgtgtcttaccgggttggactcaagacgatagttaccggataaggcgcagcggtcgggctgaacggggggttcgtgcacacagcccagcttggagcgaacgacctacaccgaactgagatacctacagcgtgagctatgagaaagcgccacgcttcccgaagggagaaaggcggacaggtatccggtaagcggcagggtcggaacaggagagcgcacgagggagcttccagggggaaacgcctggtatctttatagtcctgtcgggtttcgccacctctgacttgagcgtcgatttttgtgatgctcgtcaggggggcggagcctatggaaaaacgccagcaacgcggcctttttacggttcctggccttttgctggccttttgctcacatgttctttcctgcgttatcccctgattctgtggataaccgtattaccgcctttgagtgagctgataccgctcgccgcagccgaacgaccgagcgcagcgagtcagtgagcgaggaagcggaagagcgcccaatacgcaaaccgcctctccccgcgcgttggccgattcattaatgcagctggcacgacaggtttcccgactggaaagcgggcagtgagcgcaacgcaattaatgtgagttacctcactcattaggcaccccaggctttacactttatgcttccggctcctatgttgtgtggaattgtgagcggataacaatttcacacaggaaacagctatgaccatgattacgccaagcgcgcaattaaccctcactaaagggaacaaaagctggagctccaccgcgggatttcgaaactaagttcttggtgttttaaaactaaaaaaaagactaactataaaagtagaatttaagaagtttaagaaatagatttacagaattacaatcaatacctaccgtctttatatacttattagtcaagtaggggaataatttcagggaactggtttcaaccttttttttcagctttttccaaatcagagagagcagaaggtaatagaaggtgtaagaaaatgagatagatacatgcgtgggtcaattgccttgtgtcatcatttactccaggcaggttgcatcactccattgaggttgtgcccgttttttgcctgtttgtgcccctgttctctgtagttgcgctaagagaatggacctatgaactgatggttggtgaagaaaacaatattttggtgctgggattctttttttttctggatgccagcttaaaaagcgggctccattatatttagtggatgccaggaataaactgttcacccagacacctacgatgttatatattctgtgtaacccgccccctattttgggcatgtacgggttacagcagaattaaaaggctaattttttgactaaataaagttaggaaaatcactactattaattatttacgtattctttgaaatggcagtattgataatgataaactcgaaatcactagtggatccgcccagcggcc

SEQ ID NO: 5 - DNA, 6849 bp, Artificial Sequence
  Plasmid pRS425
tcgcgcgtttcggtgatgacggtgaaaacctctgacacatgcagctcccggagacggtcacagcttgtctgtaagcggatgccgggagcagacaagcccgtcagggcgcgtcagcgggtgttggcgggtgtcggggctggcttaactatgcggcatcagagcagattgtactgagagtgcaccatatcgactacgtcgtaaggccgtttctgacagagtaaaattcttgagggaactttcaccattatgggaaatgcttcaagaaggtattgacttaaactccatcaaatggtcaggtcattgagtgttttttatttgttgtatttttttttttttagagaaaatcctccaatatcaaattaggaatcgtagtttcatgattttctgttacacctaactttttgtgtggtgccctcctccttgtcaatattaatgttaaagtgcaattctttttccttatcacgttgagccattagtatcaatttgcttacctgtattcctttactatcctcctttttctccttcttgataaatgtatgtagattgcgtatatagtttcgtctaccctatgaacatattccattttgtaatttcgtgtcgtttctattatgaatttcatttataaagtttatgtacaaatatcataaaaaaagagaatctttttaagcaaggattttcttaacttcttcggcgacagcatcaccgacttcggtggtactgttggaaccacctaaatcaccagttctgatacctgcatccaaaacctttttaactgcatcttcaatggccttaccttcttcaggcaagttcaatgacaatttcaacatcattgcagcagacaagatagtggcgatagggtcaaccttattctttggcaaatctggagcagaaccgtggcatggttcgtacaaaccaaatgcggtgttcttgtctggcaaagaggccaaggacgcagatggcaacaaacccaaggaacctgggataacggaggcttcatcggagatgatatcaccaaacatgttgctggtgattataataccatttaggtgggttgggttcttaactaggatcatggcggcagaatcaatcaattgatgttgaaccttcaatgtagggaattcgttcttgatggtttcctccacagtttttctccataatcttgaagaggccaaaagattagctttatccaaggaccaaataggcaatggtggctcatgttgtagggccatgaaagcggccattcttgtgattctttgcacttctggaacggtgtattgttcactatcccaagcgacaccatcaccatcgtcttcctttctcttaccaaagtaaatacctcccactaattctctgacaacaacgaagtcagtacctttagcaaattgtggcttgattggagataagtctaaaagagagtcggatgcaaagttacatggtcttaagttggcgtacaattgaagttctttacggatttttagtaaaccttgttcaggtctaacactaccggtaccccatttaggaccagccacagcacctaacaaaacggcatcaaccttcttggaggcttccagcgcctcatctggaagtgggacacctgtagcatcgatagcagcaccaccaattaaatgattttcgaaatcgaacttgacattggaacgaacatcagaaatagctttaagaaccttaatggcttcggctgtgatttcttgaccaacgtggtcacctggcaaaacgacgatcttcttaggggcagacataggggcagacattagaatggtatatccttgaaatatatatatatattgctgaaatgtaaaaggtaagaaaagttagaaagtaagacgattgctaaccacctattggaaaaaacaataggtccttaaataatattgtcaacttcaagtattgtgatgcaagcatttagtcatgaacgcttctctattctatatgaaaagccggttccggcctctcacctttcctttttctcccaatttttcagttgaaaaaggtatatgcgtcaggcgacctctgaaattaacaaaaaatttccagtcatcgaatttgattctgtgcgatagcgcccctgtgtgttctcgttatgttgaggaaaaaaataatggttgctaagagattcgaactcttgcatcttacgatacctgagtattcccacagttaactgcggtcaagatatttcttgaatcaggcgccttagaccgctcggccaaacaaccaattacttgttgagaaatagagtataattatcctataaatataacgtttttgaacacacatgaacaaggaagtacaggacaattgattttgaagagaatgtggattttgatgtaattgttgggattccatttttaataaggcaataatattaggtatgtggatatactagaagttctcctcgaccgtcgatatgcggtgtgaaataccgcacagatgcgtaaggagaaaataccgcatcaggaaattgtaaacgttaatattttgttaaaattcgcgttaaatttttgttaaatcagctcattttttaaccaataggccgaaatcggcaaaatcccttataaatcaaaagaatagaccgagatagggttgagtgttgttccagtttggaacaagagtccactattaaagaacgtggactccaacgtcaaagggcgaaaaaccgtctatcagggcgatggcccactacgtgaaccatcaccctaatcaagttttttggggtcgaggtgccgtaaagcactaaatcggaaccctaaagggagcccccgatttagagcttgacggggaaagccggcgaacgtggcgagaaaggaagggaagaaagcgaaaggagcgggcgctagggcgctggcaagtgtagcggtcacgctgcgcgtaaccaccacacccgccgcgcttaatgcgccgctacagggcgcgtcgcgccattcgccattcaggctgcgcaactgttgggaagggcgatcggtgcgggcctcttcgctattacgccagctggcgaaagggggatgtgctgcaaggcgattaagttgggtaacgccagggttttcccagtcacgacgttgtaaaacgacggccagtgagcgcgcgtaatacgactcactatagggcgaattgggtaccgggccccccctcgaggtcgacggtatcgataagcttgatatcgaattcctgcagcccgggggatccactagttctagagcggccgccaccgcggtggagctccagcttttgttccctttagtgagggttaattgcgcgcttggcgtaatcatggtcatagctgtttcctgtgtgaaattgttatccgctcacaattccacacaacataggagccggaagcataaagtgtaaagcctggggtgcctaatgagtgaggtaactcacattaattgcgttgcgctcactgcccgctttccagtcgggaaacctgtcgtgccagctgcattaatgaatcggccaacgcgcggggagaggcggtttgcgtattgggcgctcttccgcttcctcgctcactgactcgctgcgctcggtcgttcggctgcggcgagcggtatcagctcactcaaaggcggtaatacggttatccacagaatcaggggataacgcaggaaagaacatgtgagcaaaaggccagcaaaaggccaggaaccgtaaaaaggccgcgttgctggcgtttttccataggctccgcccccctgacgagcatcacaaaaatcgacgctcaagtcagaggtggcgaaacccgacaggactataaagataccaggcgtttccccctggaagctccctcgtgcgctctcctgttccgaccctgccgcttaccggatacctgtccgcctttctcccttcgggaagcgtggcgctttctcatagctcacgctgtaggtatctcagttcggtgtaggtcgttcgctccaagctgggctgtgtgcacgaaccccccgttcagcccgaccgctgcgccttatccggtaactatcgtcttgagtccaacccggtaagacacgacttatcgccactggcagcagccactggtaacaggattagcagagcgaggtatgtaggcggtgctacagagttcttgaagtggtggcctaactacggctacactagaaggacagtatttggtatctgcgctctgctgaagccagttaccttcggaaaaagagttggtagctcttgatccggcaaacaaaccaccgctggtagcggtggtttttttgtttgcaagcagcagattacgcgcagaaaaaaaggatctcaagaagatcctttgatcttttctacggggtctgacgctcagtggaacgaaaactcacgttaagggattttggtcatgagattatcaaaaaggatcttcacctagatccttttaaattaaaaatgaagttttaaatcaatctaaagtatatatgagtaaacttggtctgacagttaccaatgcttaatcagtgaggcacctatctcagcgatctgtctatttcgttcatccatagttgcctgactccccgtcgtgtagataactacgatacgggagggcttaccatctggccccagtgctgcaatgataccgcgagacccacgctcaccggctccagatttatcagcaataaaccagccagccggaagggccgagcgcagaagtggtcctgcaactttatccgcctccatccagtctattaattgttgccgggaagctagagtaagtagttcgccagttaatagtttgcgcaacgttgttgccattgctacaggcatcgtggtgtcacgctcgtcgtttggtatggcttcattcagctccggttcccaacgatcaaggcgagttacatgatcccccatgttgtgcaaaaaagcggttagctccttcggtcctccgatcgttgtcagaagtaagttggccgcagtgttatcactcatggttatggcagcactgcataattctcttactgtcatgccatccgtaagatgcttttctgtgactggtgagtactcaaccaagtcattctgagaatagtgtatgcggcgaccgagttgctcttgcccggcgtcaatacgggataataccgcgccacatagcagaactttaaaagtgctcatcattggaaaacgttcttcggggcgaaaactctcaaggatcttaccgctgttgagatccagttcgatgtaacccactcgtgcacccaactgatcttcagcatcttttactttcaccagcgtttctgggtgagcaaaaacaggaaggcaaaatgccgcaaaaaagggaataagggcgacacggaaatgttgaatactcatactcttcctttttcaatattattgaagcatttatcagggttattgtctcatgagcggatacatatttgaatgtatttagaaaaataaacaaataggggttccgcgcacatttccccgaaaagtgccacctgaacgaagcatctgtgcttcattttgtagaacaaaaatgcaacgcgagagcgctaatttttcaaacaaagaatctgagctgcatttttacagaacagaaatgcaacgcgaaagcgctattttaccaacgaagaatctgtgcttcatttttgtaaaacaaaaatgcaacgcgagagcgctaatttttcaaacaaagaatctgagctgcatttttacagaacagaaatgcaacgcgagagcgctattttaccaacaaagaatctatacttcttttttgttctacaaaaatgcatcccgagagcgctatttttctaacaaagcatcttagattactttttttctcctttgtgcgctctataatgcagtctcttgataactttttgcactgtaggtccgttaaggttagaagaaggctactttggtgtctattttctcttccataaaaaaagcctgactccacttcccgcgtttactgattactagcgaagctgcgggtgcattttttcaagataaaggcatccccgattatattctataccgatgtggattgcgcatactttgtgaacagaaagtgatagcgttgatgattcttcattggtcagaaaattatgaacggtttcttctattttgtctctatatactacgtataggaaatgtttacattttcgtattgttttcgattcactctatgaatagttcttactacaatttttttgtctaaagagtaatactagagataaacataaaaaatgtagaggtcgagtttagatgcaagttcaaggagcgaaaggtggatgggtaggttatatagggatatagcacagagatatatagcaaagagatacttttgagcaatgtttgtggaagcggtattcgcaatattttagtagctcgttacagtccggtgcgtttttggttttttgaaagtgcgtcttcagagcgcttttggttttcaaaagcgctctgaagttcctatactttctagagaataggaacttcggaataggaacttcaaagcgtttccgaaaacgagcgcttccgaaaatgcaacgcgagctgcgcacatacagctcactgttcacgtcgcacctatatctgcgtgttgcctgtatatatatatacatgagaagaacggcatagtgcgtgtttatgcttaaatgcgtacttatatgcgtctatttatgtaggatgaaaggtagtctagtacctcctgtgatattatcccattccatgcggggtatcgtatgcttccttcagcactaccctttagctgttctatatgctgccactcctcaattggattagtctcatccttcaatgctatcatttcctttgatattggatcatactaagaaaccattattatcatgacattaacctataaaaataggcgtatcacgaggccctttcgtc

SEQ ID NO: 6 - DNA, 7494 bp, Artificial Sequence
  Plasmid pGPD425
ggtggagctccagcttttgttccctttagtgagggttaattgcgcgcttggcgtaatcatggtcatagctgtttcctgtgtgaaattgttatccgctcacaattccacacaacataggagccggaagcataaagtgtaaagcctggggtgcctaatgagtgaggtaactcacattaattgcgttgcgctcactgcccgctttccagtcgggaaacctgtcgtgccagctgcattaatgaatcggccaacgcgcggggagaggcggtttgcgtattgggcgctcttccgcttcctcgctcactgactcgctgcgctcggtcgttcggctgcggcgagcggtatcagctcactcaaaggcggtaatacggttatccacagaatcaggggataacgcaggaaagaacatgtgagcaaaaggccagcaaaaggccaggaaccgtaaaaaggccgcgttgctggcgtttttccataggctccgcccccctgacgagcatcacaaaaatcgacgctcaagtcagaggtggcgaaacccgacaggactataaagataccaggcgtttccccctggaagctccctcgtgcgctctcctgttccgaccctgccgcttaccggatacctgtccgcctttctcccttcgggaagcgtggcgctttctcatagctcacgctgtaggtatctcagttcggtgtaggtcgttcgctccaagctgggctgtgtgcacgaaccccccgttcagcccgaccgctgcgccttatccggtaactatcgtcttgagtccaacccggtaagacacgacttatcgccactggcagcagccactggtaacaggattagcagagcgaggtatgtaggcggtgctacagagttcttgaagtggtggcctaactacggctacactagaaggacagtatttggtatctgcgctctgctgaagccagttaccttcggaaaaagagttggtagctcttgatccggcaaacaaaccaccgctggtagcggtggtttttttgtttgcaagcagcagattacgcgcagaaaaaaaggatctcaagaagatcctttgatcttttctacggggtctgacgctcagtggaacgaaaactcacgttaagggattttggtcatgagattatcaaaaaggatcttcacctagatccttttaaattaaaaatgaagttttaaatcaatctaaagtatatatgagtaaacttggtctgacagttaccaatgcttaatcagtgaggcacctatctcagcgatctgtctatttcgttcatccatagttgcctgactccccgtcgtgtagataactacgatacgggagggcttaccatctggccccagtgctgcaatgataccgcgagacccacgctcaccggctccagatttatcagcaataaaccagccagccggaagggccgagcgcagaagtggtcctgcaactttatccgcctccatccagtctattaattgttgccgggaagctagagtaagtagttcgccagttaatagtttgcgcaacgttgttgccattgctacaggcatcgtggtgtcacgctcgtcgtttggtatggcttcattcagctccggttcccaacgatcaaggcgagttacatgatcccccatgttgtgcaaaaaagcggttagctccttcggtcctccgatcgttgtcagaagtaagttggccgcagtgttatcactcatggttatggcagcactgcataattctcttactgtcatgccatccgtaagatgcttttctgtgactggtgagtactcaaccaagtcattctgagaatagtgtatgcggcgaccgagttgctcttgcccggcgtcaatacgggataataccgcgccacatagcagaactttaaaagtgctcatcattggaaaacgttcttcggggcgaaaactctcaaggatcttaccgctgttgagatccagttcgatgtaacccactcgtgcacccaactgatcttcagcatcttttactttcaccagcgtttctgggtgagcaaaaacaggaaggcaaaatgccgcaaaaaagggaataagggcgacacggaaatgttgaatactcatactcttcctttttcaatattattgaagcatttatcagggttattgtctcatgagcggatacatatttgaatgtatttagaaaaataaacaaataggggttccgcgcacatttccccgaaaagtgccacctgaacgaagcatctgtgcttcattttgtagaacaaaaatgcaacgcgagagcgctaatttttcaaacaaagaatctgagctgcatttttacagaacagaaatgcaacgcgaaagcgctattttaccaacgaagaatctgtgcttcatttttgtaaaacaaaaatgcaacgcgagagcgctaatttttcaaacaaagaatctgagctgcatttttacagaacagaaatgcaacgcgagagcgctattttaccaacaaagaatctatacttcttttttgttctacaaaaatgcatcccgagagcgctatttttctaacaaagcatcttagattactttttttctcctttgtgcgctctataatgcagtctcttgataactttttgcactgtaggtccgttaaggttagaagaaggctactttggtgtctattttctcttccataaaaaaagcctgactccacttcccgcgtttactgattactagcgaagctgcgggtgcattttttcaagataaaggcatccccgattatattctataccgatgtggattgcgcatactttgtgaacagaaagtgatagcgttgatgattcttcattggtcagaaaattatgaacggtttcttctattttgtctctatatactacgtataggaaatgtttacattttcgtattgttttcgattcactctatgaatagttcttactacaatttttttgtctaaagagtaatactagagataaacataaaaaatgtagaggtcgagtttagatgcaagttcaaggagcgaaaggtggatgggtaggttatatagggatatagcacagagatatatagcaaagagatacttttgagcaatgtttgtggaagcggtattcgcaatattttagtagctcgttacagtccggtgcgtttttggttttttgaaagtgcgtcttcagagcgcttttggttttcaaaagcgctctgaagttcctatactttctagagaataggaacttcggaataggaacttcaaagcgtttccgaaaacgagcgcttccgaaaatgcaacgcgagctgcgcacatacagctcactgttcacgtcgcacctatatctgcgtgttgcctgtatatatatatacatgagaagaacggcatagtgcgtgtttatgcttaaatgcgtacttatatgcgtctatttatgtaggatgaaaggtagtctagtacctcctgtgatattatcccattccatgcggggtatcgtatgcttccttcagcactaccctttagctgttctatatgctgccactcctcaattggattagtctcatccttcaatgctatcatttcctttgatattggatcatactaagaaaccattattatcatgacattaacctataaaaataggcgtatcacgaggccctttcgtctcgcgcgtttcggtgatgacggtgaaaacctctgacacatgcagctcccggagacggtcacagcttgtctgtaagcggatgccgggagcagacaagcccgtcagggcgcgtcagcgggtgttggcgggtgtcggggctggcttaactatgcggcatcagagcagattgtactgagagtgcaccatatcgactacgtcgtaaggccgtttctgacagagtaaaattcttgagggaactttcaccattatgggaaatgcttcaagaaggtattgacttaaactccatcaaatggtcaggtcattgagtgttttttatttgttgtatttttttttttttagagaaaatcctccaatatcaaattaggaatcgtagtttcatgattttctgttacacctaactttttgtgtggtgccctcctccttgtcaatattaatgttaaagtgcaattctttttccttatcacgttgagccattagtatcaatttgcttacctgtattcctttactatcctcctttttctccttcttgataaatgtatgtagattgcgtatatagtttcgtctaccctatgaacatattccattttgtaatttcgtgtcgtttctattatgaatttcatttataaagtttatgtacaaatatcataaaaaaagagaatctttttaagcaaggattttcttaacttcttcggcgacagcatcaccgacttcggtggtactgttggaaccacctaaatcaccagttctgatacctgcatccaaaacctttttaactgcatcttcaatggccttaccttcttcaggcaagttcaatgacaatttcaacatcattgcagcagacaagatagtggcgatagggtcaaccttattctttggcaaatctggagcagaaccgtggcatggttcgtacaaaccaaatgcggtgttcttgtctggcaaagaggccaaggacgcagatggcaacaaacccaaggaacctgggataacggaggcttcatcggagatgatatcaccaaacatgttgctggtgattataataccatttaggtgggttgggttcttaactaggatcatggcggcagaatcaatcaattgatgttgaaccttcaatgtagggaattcgttcttgatggtttcctccacagtttttctccataatcttgaagaggccaaaagattagctttatccaaggaccaaataggcaatggtggctcatgttgtagggccatgaaagcggccattcttgtgattctttgcacttctggaacggtgtattgttcactatcccaagcgacaccatcaccatcgtcttcctttctcttaccaaagtaaatacctcccactaattctctgacaacaacgaagtcagtacctttagcaaattgtggcttgattggagataagtctaaaagagagtcggatgcaaagttacatggtcttaagttggcgtacaattgaagttctttacggatttttagtaaaccttgttcaggtctaacactaccggtaccccatttaggaccagccacagcacctaacaaaacggcatcaaccttcttggaggcttccagcgcctcatctggaagtgggacacctgtagcatcgatagcagcaccaccaattaaatgattttcgaaatcgaacttgacattggaacgaacatcagaaatagctttaagaaccttaatggcttcggctgtgatttcttgaccaacgtggtcacctggcaaaacgacgatcttcttaggggcagacataggggcagacattagaatggtatatccttgaaatatatatatatattgctgaaatgtaaaaggtaagaaaagttagaaagtaagacgattgctaaccacctattggaaaaaacaataggtccttaaataatattgtcaacttcaagtattgtgatgcaagcatttagtcatgaacgcttctctattctatatgaaaagccggttccggcctctcacctttcctttttctcccaatttttcagttgaaaaaggtatatgcgtcaggcgacctctgaaattaacaaaaaatttccagtcatcgaatttgattctgtgcgatagcgcccctgtgtgttctcgttatgttgaggaaaaaaataatggttgctaagagattcgaactcttgcatcttacgatacctgagtattcccacagttaactgcggtcaagatatttcttgaatcaggcgccttagaccgctcggccaaacaaccaattacttgttgagaaatagagtataattatcctataaatataacgtttttgaacacacatgaacaaggaagtacaggacaattgattttgaagagaatgtggattttgatgtaattgttgggattccatttttaataaggcaataatattaggtatgtggatatactagaagttctcctcgaccgtcgatatgcggtgtgaaataccgcacagatgcgtaaggagaaaataccgcatcaggaaattgtaaacgttaatattttgttaaaattcgcgttaaatttttgttaaatcagctcattttttaaccaataggccgaaatcggcaaaatcccttataaatcaaaagaatagaccgagatagggttgagtgttgttccagtttggaacaagagtccactattaaagaacgtggactccaacgtcaaagggcgaaaaaccgtctatcagggcgatggcccactacgtgaaccatcaccctaatcaagttttttggggtcgaggtgccgtaaagcactaaatcggaaccctaaagggagcccccgatttagagcttgacggggaaagccggcgaacgtggcgagaaaggaagggaagaaagcgaaaggagcgggcgctagggcgctggcaagtgtagcggtcacgctgcgcgtaaccaccacacccgccgcgcttaatgcgccgctacagggcgcgtcgcgccattcgccattcaggctgcgcaactgttgggaagggcgatcggtgcgggcctcttcgctattacgccagctggcgaaagggggatgtgctgcaaggcgattaagttgggtaacgccagggttttcccagtcacgacgttgtaaaacgacggccagtgagcgcgcgtaatacgactcactatagggcgaattgggtaccgggccccccctcgaggtcgacggtatcgataagcttgatatcgaattcctgcagcccgggggatccactagtgatttcgagtttatcattatcaatactgccatttcaaagaatacgtaaataattaatagtagtgattttcctaactttatttagtcaaaaaattagccttttaattctgctgtaacccgtacatgcccaaaatagggggcgggttacacagaatatataacatcgtaggtgtctgggtgaacagtttattcctggcatccactaaatataatggagcccgctttttaagctggcatccagaaaaaaaaagaatcccagcaccaaaatattgttttcttcaccaaccatcagttcataggtccattctcttagcgcaactacagagaacaggggcacaaacaggcaaaaaacgggcacaacctcaatggagtgatgcaacctgcctggagtaaatgatgacacaaggcaattgacccacgcatgtatctatctcattttcttacaccttctattaccttctgctctctctgatttggaaaaagctgaaaaaaaaggttgaaaccagttccctgaaattattcccctacttgactaataagtatataaagacggtaggtattgattgtaattctgtaaatctatttcttaaacttcttaaattctacttttatagttagtcttttttttagttttaaaacaccaagaacttagtttcgaaatcccgc

SEQ ID NO: 7 - DNA, 36 bp, Artificial Sequence
  Primer oYLDGAT2-1
gcggccgcatgactatcgactcacaatactacaagt

SEQ ID NO: 8 - DNA, 36 bp, Artificial Sequence
  Primer  oYLDGAT2-2
gcggccgcttactcaatcattcggaactctggggct

SEQ ID NO: 9 - DNA, 1545 bp, Yarrowia lipolytica
atgactatcgactcacaatactacaagtcgcgagacaaaaacgacacggcacccaaaatcgcgggaatccgatatgccccgctatcgacaccattactcaaccgatgtgagaccttctctctggtctggcacattttcagcattcccactttcctcacaattttcatgctatgctgcgcaattccactgctctggccatttgtgattgcgtatgtagtgtacgctgttaaagacgactccccgtccaacggaggagtggtcaagcgatactcgcctatttcaagaaacttcttcatctggaagctctttggccgctacttccccataactctgcacaagacggtggatctggagcccacgcacacatactaccctctggacgtccaggagtatcacctgattgctgagagatactggccgcagaacaagtacctccgagcaatcatcaccaccatcgagtactttctgcccgccttcatgaaacggtctctttctatcaacgagcaggagcagcctgccgagcgagatcctctcctgtctcccgtttctcccagctctccgggttctcaacctgacaagtggattaaccacgacagcagatatagccgtggagaatcatctggctccaacggccacgcctcgggctccgaacttaacggcaacggcaacaacggcaccactaaccgacgacctttgtcgtccgcctctgctggctccactgcatctgattccacgcttcttaacgggtccctcaactcctacgccaaccagatcattggcgaaaacgacccacagctgtcgcccacaaaactcaagcccactggcagaaaatacatcttcggctaccacccccacggcattatcggcatgggagcctttggtggaattgccaccgagggagctggatggtccaagctctttccgggcatccctgtttctcttatgactctcaccaacaacttccgagtgcctctctacagagagtacctcatgagtctgggagtcgcttctgtctccaagaagtcctgcaaggccctcctcaagcgaaaccagtctatctgcattgtcgttggtggagcacaggaaagtcttctggccagacccggtgtcatggacctggtgctactcaagcgaaagggttttgttcgacttggtatggaggtcggaaatgtcgcccttgttcccatcatggcctttggtgagaacgacctctatgaccaggttagcaacgacaagtcgtccaagctgtaccgattccagcagtttgtcaagaacttccttggattcacccttcctttgatgcatgcccgaggcgtcttcaactacgatgtcggtcttgtcccctacaggcgacccgtcaacattgtggttggttcccccattgacttgccttatctcccacaccccaccgacgaagaagtgtccgaataccacgaccgatacatcgccgagctgcagcgaatctacaacgagcacaaggatgaatatttcatcgattggaccgaggagggcaaaggagccccagagttccgaatgattgagtaa

SEQ ID NO: 10 - protein, 514 aa, Yarrowia lipolytica
MTIDSQYYKSRDKNDTAPKIAGIRYAPLSTPLLNRCETFSLVWHIFSIPTFLTIFMLCCAIPLLWPFVIAYVVYAVKDDSPSNGGVVKRYSPISRNFFIWKLFGRYFPITLHKTVDLEPTHTYYPLDVQEYHLIAERYWPQNKYLRAIITTIEYFLPAFMKRSLSINEQEQPAERDPLLSPVSPSSPGSQPDKWINHDSRYSRGESSGSNGHASGSELNGNGNNGTTNRRPLSSASAGSTASDSTLLNGSLNSYANQIIGENDPQLSPTKLKPTGRKYIFGYHPHGIIGMGAFGGIATEGAGWSKLFPGIPVSLMTLTNNFRVPLYREYLMSLGVASVSKKSCKALLKRNQSICIVVGGAQESLLARPGVMDLVLLKRKGFVRLGMEVGNVALVPIMAFGENDLYDQVSNDKSSKLYRFQQFVKNFLGFTLPLMHARGVFNYDVGLVPYRRPVNIVVGSPIDLPYLPHPTDEEVSEYHDRYIAELQRIYNEHKDEYFIDWTEEGKGAPEFRMIE

SEQ ID NO: 11 - DNA, 9070 bp, Artificial Sequence
  Plasmid pY75 YLDGAT2
ggccgcagggcggatcccccgggctgcaggaattcgatatcaagcttatcgataccgtcgacctcgagggggggcccggtacccaattcgccctatagtgagtcgtattacgcgcgctcactggccgtcgttttacaacgtcgtgactgggaaaaccctggcgttacccaacttaatcgccttgcagcacatccccctttcgccagctggcgtaatagcgaagaggcccgcaccgatcgcccttcccaacagttgcgcagcctgaatggcgaatggcgcgacgcgccctgtagcggcgcattaagcgcggcgggtgtggtggttacgcgcagcgtgaccgctacacttgccagcgccctagcgcccgctcctttcgctttcttcccttcctttctcgccacgttcgccggctttccccgtcaagctctaaatcgggggctccctttagggttccgatttagtgctttacggcacctcgaccccaaaaaacttgattagggtgatggttcacgtagtgggccatcgccctgatagacggtttttcgccctttgacgttggagtccacgttctttaatagtggactcttgttccaaactggaacaacactcaaccctatctcggtctattcttttgatttataagggattttgccgatttcggcctattggttaaaaaatgagctgatttaacaaaaatttaacgcgaattttaacaaaatattaacgtttacaatttcctgatgcggtattttctccttacgcatctgtgcggtatttcacaccgcatatcgacggtcgaggagaacttctagtatatccacatacctaatattattgccttattaaaaatggaatcccaacaattacatcaaaatccacattctcttcaaaatcaattgtcctgtacttccttgttcatgtgtgttcaaaaacgttatatttataggataattatactctatttctcaacaagtaattggttgtttggccgagcggtctaaggcgcctgattcaagaaatatcttgaccgcagttaactgtgggaatactcaggtatcgtaagatgcaagagttcgaatctcttagcaaccattatttttttcctcaacataacgagaacacacaggggcgctatcgcacagaatcaaattcgatgactggaaattttttgttaatttcagaggtcgcctgacgcatatacctttttcaactgaaaaattgggagaaaaaggaaaggtgagaggccggaaccggcttttcatatagaatagagaagcgttcatgactaaatgcttgcatcacaatacttgaagttgacaatattatttaaggacctattgttttttccaataggtggttagcaatcgtcttactttctaacttttcttaccttttacatttcagcaatatatatatatatttcaaggatataccattctaatgtctgcccctatgtctgcccctaagaagatcgtcgttttgccaggtgaccacgttggtcaagaaatcacagccgaagccattaaggttcttaaagctatttctgatgttcgttccaatgtcaagttcgatttcgaaaatcatttaattggtggtgctgctatcgatgctacaggtgtcccacttccagatgaggcgctggaagcctccaagaaggttgatgccgttttgttaggtgctgtggctggtcctaaatggggtaccggtagtgttagacctgaacaaggtttactaaaaatccgtaaagaacttcaattgtacgccaacttaagaccatgtaactttgcatccgactctcttttagacttatctccaatcaagccacaatttgctaaaggtactgacttcgttgttgtcagagaattagtgggaggtatttactttggtaagagaaaggaagacgatggtgatggtgtcgcttgggatagtgaacaatacaccgttccagaagtgcaaagaatcacaagaatggccgctttcatggccctacaacatgagccaccattgcctatttggtccttggataaagctaatcttttggcctcttcaagattatggagaaaaactgtggaggaaaccatcaagaacgaattccctacattgaaggttcaacatcaattgattgattctgccgccatgatcctagttaagaacccaacccacctaaatggtattataatcaccagcaacatgtttggtgatatcatctccgatgaagcctccgttatcccaggttccttgggtttgttgccatctgcgtccttggcctctttgccagacaagaacaccgcatttggtttgtacgaaccatgccacggttctgctccagatttgccaaagaataaggttgaccctatcgccactatcttgtctgctgcaatgatgttgaaattgtcattgaacttgcctgaagaaggtaaggccattgaagatgcagttaaaaaggttttggatgcaggtatcagaactggtgatttaggtggttccaacagtaccaccgaagtcggtgatgctgtcgccgaagaagttaagaaaatccttgcttaaaaagattctctttttttatgatatttgtacataaactttataaatgaaattcataatagaaacgacacgaaattacaaaatggaatatgttcatagggtagacgaaactatatacgcaatctacatacatttatcaagaaggagaaaaaggaggatagtaaaggaatacaggtaagcaaattgatactaatggctcaacgtgataaggaaaaagaattgcactttaacattaatattgacaaggaggagggcaccacacaaaaagttaggtgtaacagaaaatcatgaaactacgattcctaatttgatattggaggattttctctaaaaaaaaaaaaatacaacaaataaaaaacactcaatgacctgaccatttgatggagtttaagtcaataccttcttgaagcatttcccataatggtgaaagttccctcaagaattttactctgtcagaaacggccttacgacgtagtcgatatggtgcactctcagtacaatctgctctgatgccgcatagttaagccagccccgacacccgccaacacccgctgacgcgccctgacgggcttgtctgctcccggcatccgcttacagacaagctgtgaccgtctccgggagctgcatgtgtcagaggttttcaccgtcatcaccgaaacgcgcgagacgaaagggcctcgtgatacgcctatttttataggttaatgtcatgataataatggtttcttagtatgatccaatatcaaaggaaatgatagcattgaaggatgagactaatccaattgaggagtggcagcatatagaacagctaaagggtagtgctgaaggaagcatacgataccccgcatggaatgggataatatcacaggaggtactagactacctttcatcctacataaatagacgcatataagtacgcatttaagcataaacacgcactatgccgttcttctcatgtatatatatatacaggcaacacgcagatataggtgcgacgtgaacagtgagctgtatgtgcgcagctcgcgttgcattttcggaagcgctcgttttcggaaacgctttgaagttcctattccgaagttcctattctctagaaagtataggaacttcagagcgcttttgaaaaccaaaagcgctctgaagacgcactttcaaaaaaccaaaaacgcaccggactgtaacgagctactaaaatattgcgaataccgcttccacaaacattgctcaaaagtatctctttgctatatatctctgtgctatatccctatataacctacccatccacctttcgctccttgaacttgcatctaaactcgacctctacattttttatgtttatctctagtattactctttagacaaaaaaattgtagtaagaactattcatagagtgaatcgaaaacaatacgaaaatgtaaacatttcctatacgtagtatatagagacaaaatagaagaaaccgttcataattttctgaccaatgaagaatcatcaacgctatcactttctgttcacaaagtatgcgcaatccacatcggtatagaatataatcggggatgcctttatcttgaaaaaatgcacccgcagcttcgctagtaatcagtaaacgcgggaagtggagtcaggctttttttatggaagagaaaatagacaccaaagtagccttcttctaaccttaacggacctacagtgcaaaaagttatcaagagactgcattatagagcgcacaaaggagaaaaaaagtaatctaagatgctttgttagaaaaatagcgctctcgggatgcatttttgtagaacaaaaaagaagtatagattctttgttggtaaaatagcgctctcgcgttgcatttctgttctgtaaaaatgcagctcagattctttgtttgaaaaattagcgctctcgcgttgcatttttgttttacaaaaatgaagcacagattcttcgttggtaaaatagcgctttcgcgttgcatttctgttctgtaaaaatgcagctcagattctttgtttgaaaaattagcgctctcgcgttgcatttttgttctacaaaatgaagcacagatgcttcgttcaggtggcacttttcggggaaatgtgcgcggaacccctatttgtttatttttctaaatacattcaaatatgtatccgctcatgagacaataaccctgataaatgcttcaataatattgaaaaaggaagagtatgagtattcaacatttccgtgtcgcccttattcccttttttgcggcattttgccttcctgtttttgctcacccagaaacgctggtgaaagtaaaagatgctgaagatcagttgggtgcacgagtgggttacatcgaactggatctcaacagcggtaagatccttgagagttttcgccccgaagaacgttttccaatgatgagcacttttaaagttctgctatgtggcgcggtattatcccgtattgacgccgggcaagagcaactcggtcgccgcatacactattctcagaatgacttggttgagtactcaccagtcacagaaaagcatcttacggatggcatgacagtaagagaattatgcagtgctgccataaccatgagtgataacactgcggccaacttacttctgacaacgatcggaggaccgaaggagctaaccgcttttttgcacaacatgggggatcatgtaactcgccttgatcgttgggaaccggagctgaatgaagccataccaaacgacgagcgtgacaccacgatgcctgtagcaatggcaacaacgttgcgcaaactattaactggcgaactacttactctagcttcccggcaacaattaatagactggatggaggcggataaagttgcaggaccacttctgcgctcggcccttccggctggctggtttattgctgataaatctggagccggtgagcgtgggtctcgcggtatcattgcagcactggggccagatggtaagccctcccgtatcgtagttatctacacgacggggagtcaggcaactatggatgaacgaaatagacagatcgctgagataggtgcctcactgattaagcattggtaactgtcagaccaagtttactcatatatactttagattgatttaaaacttcatttttaatttaaaaggatctaggtgaagatcctttttgataatctcatgaccaaaatcccttaacgtgagttttcgttccactgagcgtcagaccccgtagaaaagatcaaaggatcttcttgagatcctttttttctgcgcgtaatctgctgcttgcaaacaaaaaaaccaccgctaccagcggtggtttgtttgccggatcaagagctaccaactctttttccgaaggtaactggcttcagcagagcgcagataccaaatactgtccttctagtgtagccgtagttaggccaccacttcaagaactctgtagcaccgcctacatacctcgctctgctaatcctgttaccagtggctgctgccagtggcgataagtcgtgtcttaccgggttggactcaagacgatagttaccggataaggcgcagcggtcgggctgaacggggggttcgtgcacacagcccagcttggagcgaacgacctacaccgaactgagatacctacagcgtgagctatgagaaagcgccacgcttcccgaagggagaaaggcggacaggtatccggtaagcggcagggtcggaacaggagagcgcacgagggagcttccagggggaaacgcctggtatctttatagtcctgtcgggtttcgccacctctgacttgagcgtcgatttttgtgatgctcgtcaggggggcggagcctatggaaaaacgccagcaacgcggcctttttacggttcctggccttttgctggccttttgctcacatgttctttcctgcgttatcccctgattctgtggataaccgtattaccgcctttgagtgagctgataccgctcgccgcagccgaacgaccgagcgcagcgagtcagtgagcgaggaagcggaagagcgcccaatacgcaaaccgcctctccccgcgcgttggccgattcattaatgcagctggcacgacaggtttcccgactggaaagcgggcagtgagcgcaacgcaattaatgtgagttacctcactcattaggcaccccaggctttacactttatgcttccggctcctatgttgtgtggaattgtgagcggataacaatttcacacaggaaacagctatgaccatgattacgccaagcgcgcaattaaccctcactaaagggaacaaaagctggagctccaccgcgggatttcgaaactaagttcttggtgttttaaaactaaaaaaaagactaactataaaagtagaatttaagaagtttaagaaatagatttacagaattacaatcaatacctaccgtctttatatacttattagtcaagtaggggaataatttcagggaactggtttcaaccttttttttcagctttttccaaatcagagagagcagaaggtaatagaaggtgtaagaaaatgagatagatacatgcgtgggtcaattgccttgtgtcatcatttactccaggcaggttgcatcactccattgaggttgtgcccgttttttgcctgtttgtgcccctgttctctgtagttgcgctaagagaatggacctatgaactgatggttggtgaagaaaacaatattttggtgctgggattctttttttttctggatgccagcttaaaaagcgggctccattatatttagtggatgccaggaataaactgttcacccagacacctacgatgttatatattctgtgtaacccgccccctattttgggcatgtacgggttacagcagaattaaaaggctaattttttgactaaataaagttaggaaaatcactactattaattatttacgtattctttgaaatggcagtattgataatgataaactcgaaatcactagtggatccgcccagcggccgcatgactatcgactcacaatactacaagtcgcgagacaaaaacgacacggcacccaaaatcgcgggaatccgatatgccccgctatcgacaccattactcaaccgatgtgagaccttctctctggtctggcacattttcagcattcccactttcctcacaattttcatgctatgctgcgcaattccactgctctggccatttgtgattgcgtatgtagtgtacgctgttaaagacgactccccgtccaacggaggagtggtcaagcgatactcgcctatttcaagaaacttcttcatctggaagctctttggccgctacttccccataactctgcacaagacggtggatctggagcccacgcacacatactaccctctggacgtccaggagtatcacctgattgctgagagatactggccgcagaacaagtacctccgagcaatcatctccaccatcgagtactttctgcccgccttcatgaaacggtctctttctatcaacgagcaggagcagcctgccgagcgagatcctctcctgtctcccgtttctcccagctctccgggttctcaacctgacaagtggattaaccacgacagcagatatagccgtggagaatcatctggctccaacggccacgcctcgggctccgaacttaacggcaacggcaacaatggcaccactaaccgacgacctttgtcgtccgcctctgctggctccactgcatctgattccacgcttcttaacgggtccctcaactcctacgccaaccagatcattggcgaaaacgacccacagctgtcgcccacaaaactcaagcccactggcagaaaatacatcttcggctaccacccccacggcattatcggcatgggagcctttggtggaattgccaccgagggagctggatggtccaagctctttccgggcatccctgtttctcttatgactctcaccaacaacttccgagtgcctctctacagagagtacctcatgagtctgggagtcgcttctgtctccaagaagtcctgcaaggccctcctcaagcgaaaccagtctatctgcattgtcgttggtggagcacaggaaagtcttctggccagacccggtgtcatggacctggtgctactcaagcgaaagggttttgttcgacttggtatggaggtcggaaatgtcgcccttgttcccatcatggcctttggtgagaacgacctctatgaccaggttagcaacgacaagtcgtccaagctgtaccgattccagcagtttgtcaagaacttccttggattcacccttcctttgatgcatgcccgaggcgtcttcaactacgatgtcggtcttgtcccctacaggcgacccgtcaacattgtggttggttcccccattgacttgccttatctcccacaccccaccgacgaagaagtgtccgaataccacgaccgatacatcgccgagctgcagcgaatctacaacgagcacaaggatgaatatttcatcgattggaccgaggagggcaaaggagcccagagttccgaatgattgagtaagc

SEQ ID NO: 12 - DNA, 32 bp, Artificial Sequence
  Primer YDGAT1-F
gatcatccatggaagtccgacgacgaaaaatc

SEQ ID NO: 13 - DNA, 36 bp, Artificial Sequence
  Primer YDGAT1-R
gatcaagcggccgcctactggttctgcttgtagttg

SEQ ID NO: 14 - DNA, 35 bp, Artificial Sequence
  Primer YDGAT2-F
gatcatccatggctatcgactcacaatactacaag

SEQ ID NO: 15 - DNA, 37 bp, Artificial Sequence
  Primer YDGAT2-R
gatcatgcggccgcttactcaatcattcggaactctg

SEQ ID NO: 16 - DNA, 1603 bp, Yarrowia lipolytica
gatcatccatggaagtccgacgacgaaaaatcgacgtgctcaaggcccagaaaaacggctacgaatcgggcccaccatctcgacaatcgtcgcagccctcctcaagagcatcgtccagaacccgcaacaaacactcctcgtccaccctgtcgctcagcggactgaccatgaaagtccagaagaaacctgcgggacccccggcgaactccaaaacgccattcctacacatcaagcccgtgcacacgtgctgctccacatcaatgctttcgcgcgattatgacggctccaaccccagcttcaagggcttcaaaaacatcggcatgatcattctcattgtgggaaatctacggctcgcattcgaaaactacctcaaatacggcatttccaacccgttcttcgaccccaaaattactccttccgagtggcagctctcaggcttgctcatagtcgtggcctacgcacatatcctcatggcctacgctattgagagcgctgccaagctgctgttcctctctagcaaacaccactacatggccgtggggcttctgcataccatgaacactttgtcgtccatctcgttgctgtcctacgtcgtctactactacctgcccaaccccgtggcaggcacaatagtcgagtttgtggccgttattctgtctctcaaactcgcctcatacgccctcactaactcggatctccgaaaagccgcaattcatgcccagaagctcgacaagacgcaagacgataacgaaaaggaatccacctcgtcttcctcttcttcagatgacgcagagactttggcagacattgacgtcattcctgcatactacgcacagctgccctacccccagaatgtgacgctgtcgaacctgctgtacttctggtttgctcccacactggtctaccagcccgtgtaccccaagacggagcgtattcgacccaagcacgtgatccgaaacctgtttgagctcgtctctctgtgcatgcttattcagtttctcatcttccagtacgcctaccccatcatgcagtcgtgtctggctctgttcttccagcccaagctcgattatgccaacatctccgagcgcctcatgaagttggcctccgtgtctatgatggtctggctcattggattctacgctttcttccagaacggtctcaatcttattgccgagctcacctgttttggaaacagaaccttctaccagcagtggtggaattcccgctccattggccagtactggactctatggaacaagccagtcaaccagtactttagacaccacgtctacgtgcctcttctcgctcggggcatgtcgcggttcaatgcgtcggtggtggttttctttttctccgccgtcatccatgaactgcttgtcggcatccccactcacaacatcatcggagccgccttcttcggcatgatgtcgcaggtgcctctgatcatggctactgagaaccttcagcatattaactcctctctgggccccttccttggcaactgtgcattctggttcacctttttcctgggacaacccacttgtgcattcctttattatctggcttacaactacaagcagaaccagtaggcggccgcttgatc

SEQ ID NO: 17 - DNA, 1567 bp, Yarrowia lipolytica
gatcatccatggctatcgactcacaatactacaagtcgcgagacaaaaacgacacggcacccaaaatcgcgggaatccgatatgccccgctatcgacaccattactcaaccgatgtgagaccttctctctggtctggcacattttcagcattcccactttcctcacaattttcatgctatgctgcgcaattccactgctctggccatttgtgattgcgtatgtagtgtacgctgttaaagacgactccccgtccaacggaggagtggtcaagcgatactcgcctatttcaagaaacttcttcatctggaagctctttggccgctacttccccataactctgcacaagacggtggatctggagcccacgcacacatactaccctctggacgtccaggagtatcacctgattgctgagagatactggccgcagaacaagtacctccgagcaatcatctccaccatcgagtactttctgcccgccttcatgaaacggtctctttctatcaacgagcaggagcagcctgccgagcgagatcctctcctgtctcccgtttctcccagctctccgggttctcaacctgacaagtggattaaccacgacagcagatatagccgtggagaatcatctggctccaacggccacgcctcgggctccgaacttaacggcaacggcaacaatggcaccactaaccgacgacctttgtcgtccgcctctgctggctccactgcatctgattccacgcttcttaacgggtccctcaactcctacgccaaccagatcattggcgaaaacgacccacagctgtcgcccacaaaactcaagcccactggcagaaaatacatcttcggctaccacccccacggcattatcggcatgggagcctttggtggaattgccaccgagggagctggatggtccaagctctttccgggcatccctgtttctcttatgactctcaccaacaacttccgagtgcctctctacagagagtacctcatgagtctgggagtcgcttctgtctccaagaagtcctgcaaggccctcctcaagcgaaaccagtctatctgcattgtcgttggtggagcacaggaaagtcttctggccagacccggtgtcatggacctggtgctactcaagcgaaagggttttgttcgacttggtatggaggtcggaaatgtcgcccttgttcccatcatggcctttggtgagaacgacctctatgaccaggttagcaacgacaagtcgtccaagctgtaccgattccagcagtttgtcaagaacttccttggattcacccttcctttgatgcatgcccgaggcgtcttcaactacgatgtcggtcttgtcccctacaggcgacccgtcaacattgtggttggttcccccattgacttgccttatctcccacaccccaccgacgaagaagtgtccgaataccacgaccgatacatcgccgagctgcagcgaatctacaacgagcacaaggatgaatatttcatcgattggaccgaggagggcaaaggagccccagagttccgaatgattgagtaagcggccgcatgatc

SEQ ID NO: 18 - DNA, 6991 bp, Artificial Sequence
  Plasmid pFBAIN-MOD-1
gcggccgcaagtgtggatggggaagtgagtgcccggttctgtgtgcacaattggcaatccaagatggatggattcaacacagggatatagcgagctacgtggtggtgcgaggatatagcaacggatatttatgtttgacacttgagaatgtacgatacaagcactgtccaagtacaatactaaacatactgtacatactcatactcgtacccgggcaacggtttcacttgagtgcagtggctagtgctcttactcgtacagtgtgcaatactgcgtatcatagtctttgatgtatatcgtattcattcatgttagttgcgtacgagccggaagcataaagtgtaaagcctggggtgcctaatgagtgagctaactcacattaattgcgttgcgctcactgcccgctttccagtcgggaaacctgtcgtgccagctgcattaatgaatcggccaacgcgcggggagaggcggtttgcgtattgggcgctcttccgcttcctcgctcactgactcgctgcgctcggtcgttcggctgcggcgagcggtatcagctcactcaaaggcggtaatacggttatccacagaatcaggggataacgcaggaaagaacatgtgagcaaaaggccagcaaaaggccaggaaccgtaaaaaggccgcgttgctggcgtttttccataggctccgcccccctgacgagcatcacaaaaatcgacgctcaagtcagaggtggcgaaacccgacaggactataaagataccaggcgtttccccctggaagctccctcgtgcgctctcctgttccgaccctgccgcttaccggatacctgtccgcctttctcccttcgggaagcgtggcgctttctcatagctcacgctgtaggtatctcagttcggtgtaggtcgttcgctccaagctgggctgtgtgcacgaaccccccgttcagcccgaccgctgcgccttatccggtaactatcgtcttgagtccaacccggtaagacacgacttatcgccactggcagcagccactggtaacaggattagcagagcgaggtatgtaggcggtgctacagagttcttgaagtggtggcctaactacggctacactagaaggacagtatttggtatctgcgctctgctgaagccagttaccttcggaaaaagagttggtagctcttgatccggcaaacaaaccaccgctggtagcggtggtttttttgtttgcaagcagcagattacgcgcagaaaaaaaggatctcaagaagatcctttgatcttttctacggggtctgacgctcagtggaacgaaaactcacgttaagggattttggtcatgagattatcaaaaaggatcttcacctagatccttttaaattaaaaatgaagttttaaatcaatctaaagtatatatgagtaaacttggtctgacagttaccaatgcttaatcagtgaggcacctatctcagcgatctgtctatttcgttcatccatagttgcctgactccccgtcgtgtagataactacgatacgggagggcttaccatctggccccagtgctgcaatgataccgcgagacccacgctcaccggctccagatttatcagcaataaaccagccagccggaagggccgagcgcagaagtggtcctgcaactttatccgcctccatccagtctattaattgttgccgggaagctagagtaagtagttcgccagttaatagtttgcgcaacgttgttgccattgctacaggcatcgtggtgtcacgctcgtcgtttggtatggcttcattcagctccggttcccaacgatcaaggcgagttacatgatcccccatgttgtgcaaaaaagcggttagctccttcggtcctccgatcgttgtcagaagtaagttggccgcagtgttatcactcatggttatggcagcactgcataattctcttactgtcatgccatccgtaagatgcttttctgtgactggtgagtactcaaccaagtcattctgagaatagtgtatgcggcgaccgagttgctcttgcccggcgtcaatacgggataataccgcgccacatagcagaactttaaaagtgctcatcattggaaaacgttcttcggggcgaaaactctcaaggatcttaccgctgttgagatccagttcgatgtaacccactcgtgcacccaactgatcttcagcatcttttactttcaccagcgtttctgggtgagcaaaaacaggaaggcaaaatgccgcaaaaaagggaataagggcgacacggaaatgttgaatactcatactcttcctttttcaatattattgaagcatttatcagggttattgtctcatgagcggatacatatttgaatgtatttagaaaaataaacaaataggggttccgcgcacatttccccgaaaagtgccacctgacgcgccctgtagcggcgcattaagcgcggcgggtgtggtggttacgcgcagcgtgaccgctacacttgccagcgccctagcgcccgctcctttcgctttcttcccttcctttctcgccacgttcgccggctttccccgtcaagctctaaatcgggggctccctttagggttccgatttagtgctttacggcacctcgaccccaaaaaacttgattagggtgatggttcacgtagtgggccatcgccctgatagacggtttttcgccctttgacgttggagtccacgttctttaatagtggactcttgttccaaactggaacaacactcaaccctatctcggtctattcttttgatttataagggattttgccgatttcggcctattggttaaaaaatgagctgatttaacaaaaatttaacgcgaattttaacaaaatattaacgcttacaatttccattcgccattcaggctgcgcaactgttgggaagggcgatcggtgcgggcctcttcgctattacgccagctggcgaaagggggatgtgctgcaaggcgattaagttgggtaacgccagggttttcccagtcacgacgttgtaaaacgacggccagtgaattgtaatacgactcactatagggcgaattgggtaccgggccccccctcgaggtcgatggtgtcgataagcttgatatcgaattcatgtcacacaaaccgatcttcgcctcaaggaaacctaattctacatccgagagactgccgagatccagtctacactgattaattttcgggccaataatttaaaaaaatcgtgttatataatattatatgtattatatatatacatcatgatgatactgacagtcatgtcccattgctaaatagacagactccatctgccgcctccaactgatgttctcaatatttaaggggtcatctcgcattgtttaataataaacagactccatctaccgcctccaaatgatgttctcaaaatatattgtatgaacttatttttattacttagtattattagacaacttacttgctttatgaaaaacacttcctatttaggaaacaatttataatggcagttcgttcatttaacaatttatgtagaataaatgttataaatgcgtatgggaaatcttaaatatggatagcataaatgatatctgcattgcctaattcgaaatcaacagcaacgaaaaaaatcccttgtacaacataaatagtcatcgagaaatatcaactatcaaagaacagctattcacacgttactattgagattattattggacgagaatcacacactcaactgtctttctctcttctagaaatacaggtacaagtatgtactattctcattgttcatacttctagtcatttcatcccacatattccttggatttctctccaatgaatgacattctatcttgcaaattcaacaattataataagatataccaaagtagcggtatagtggcaatcaaaaagcttctctggtgtgcttctcgtatttatttttattctaatgatccattaaaggtatatatttatttcttgttatataatccttttgtttattacatgggctggatacataaaggtattttgatttaattttttgcttaaattcaatcccccctcgttcagtgtcaactgtaatggtaggaaattaccatacttttgaagaagcaaaaaaaatgaaagaaaaaaaaaatcgtatttccaggttagacgttccgcagaatctagaatgcggtatgcggtacattgttcttcgaacgtaaaagttgcgctccctgagatattgtacatttttgcttttacaagtacaagtacatcgtacaactatgtactactgttgatgcatccacaacagtttgttttgtttttttttgttttttttttttctaatgattcattaccgctatgtatacctacttgtacttgtagtaagccgggttattggcgttcaattaatcatagacttatgaatctgcacggtgtgcgctgcgagttacttttagcttatgcatgctacttgggtgtaatattgggatctgttcggaaatcaacggatgctcaatcgatttcgacagtaattaattaagtcatacacaagtcagctttcttcgagcctcatataagtataagtagttcaacgtattagcactgtacccagcatctccgtatcgagaaacacaacaacatgccccattggacagatcatgcggatacacaggttgtgcagtatcatacatactcgatcagacaggtcgtctgaccatcatacaagctgaacaagcgctccatacttgcacgctctctatatacacagttaaattacatatccatagtctaacctctaacagttaatcttctggtaagcctcccagccagccttctggtatcgcttggcctcctcaataggatctcggttctggccgtacagacctcggccgacaattatgatatccgttccggtagacatgacatcctcaacagttcggtactgctgtccgagagcgtctcccttgtcgtcaagacccaccccgggggtcagaataagccagtcctcagagtcgcccttaggtcggttctgggcaatgaagccaaccacaaactcggggtcggatcgggcaagctcaatggtctgcttggagtactcgccagtggccagagagcccttgcaagacagctcggccagcatgagcagacctctggccagcttctcgttgggagaggggactaggaactccttgtactgggagttctcgtagtcagagacgtcctccttcttctgttcagagacagtttcctcggcaccagctcgcaggccagcaatgattccggttccgggtacaccgtgggcgttggtgatatcggaccactcggcgattcggtgacaccggtactggtgcttgacagtgttgccaatatctgcgaactttctgtcctcgaacaggaagaaaccgtgcttaagagcaagttccttgagggggagcacagtgccggcgtaggtgaagtcgtcaatgatgtcgatatgggttttgatcatgcacacataaggtccgaccttatcggcaagctcaatgagctccttggtggtggtaacatccagagaagcacacaggttggttttcttggctgccacgagcttgagcactcgagcggcaaaggcggacttgtggacgttagctcgagcttcgtaggagggcattttggtggtgaagaggagactgaaataaatttagtctgcagaactttttatcggaaccttatctggggcagtgaagtatatgttatggtaatagttacgagttagttgaacttatagatagactggactatacggctatcggtccaaattagaaagaacgtcaatggctctctgggcgtcgcctttgccgacaaaaatgtgatcatgatgaaagccagcaatgacgttgcagctgatattgttgtcggccaaccgcgccgaaaacgcagctgtcagacccacagcctccaacgaagaatgtatcgtcaaagtgatccaagcacactcatagttggagtcgtactccaaaggcggcaatgacgagtcagacagatactcgtcgaaaacagtgtacgcagatctactatagaggaacatttaaattgccccggagaagacggccaggccgcctagatgacaaattcaacaactcacagctgactttctgccattgccactaggggggggcctttttatatggccaagccaagctctccacgtcggttgggctgcacccaacaataaatgggtagggttgcaccaacaaagggatgggatggggggtagaagatacgaggataacggggctcaatggcacaaataagaacgaatactgccattaagactcgtgatccagcgactgacaccattgcatcatctaagggcctcaaaactacctcggaactgctgcgctgatctggacaccacagaggttccgagcactttaggttgcaccaaatgtcccaccaggtgcaggcagaaaacgctggaacagcgtgtacagtttgtcttaacaaaaagtgagggcgctgaggtcgagcagggtggtgtgacttgttatagcctttagagctgcgaaagcgcgtatggatttggctcatcaggccagattgagggtctgtggacacatgtcatgttagtgtacttcaatcgccccctggatatagccccgacaataggccgtggcctcatttttttgccttccgcacatttccattgctcggtacccacaccttgcttctcctgcacttgccaaccttaatactggtttacattgaccaacatcttacaagcggggggcttgtctagggtatatataaacagtggctctcccaatcggttgccagtctcttttttcctttctttccccacagattcgaaatctaaactacacatcacagaattccgagccgtgagtatccacgacaagatcagtgtcgagacgacgcgttttgtgtaatgacacaatccgaaagtcgctagcaacacacactctctacacaaactaacccagctctggtaccatgg

SEQ ID NO: 19 - DNA, 8568 bp, Artificial Sequence
  Plasmid pFBAIN-YLDGAT1
ggccgcaagtgtggatggggaagtgagtgcccggttctgtgtgcacaattggcaatccaagatggatggattcaacacagggatatagcgagctacgtggtggtgcgaggatatagcaacggatatttatgtttgacacttgagaatgtacgatacaagcactgtccaagtacaatactaaacatactgtacatactcatactcgtacccgggcaacggtttcacttgagtgcagtggctagtgctcttactcgtacagtgtgcaatactgcgtatcatagtctttgatgtatatcgtattcattcatgttagttgcgtacgagccggaagcataaagtgtaaagcctggggtgcctaatgagtgagctaactcacattaattgcgttgcgctcactgcccgctttccagtcgggaaacctgtcgtgccagctgcattaatgaatcggccaacgcgcggggagaggcggtttgcgtattgggcgctcttccgcttcctcgctcactgactcgctgcgctcggtcgttcggctgcggcgagcggtatcagctcactcaaaggcggtaatacggttatccacagaatcaggggataacgcaggaaagaacatgtgagcaaaaggccagcaaaaggccaggaaccgtaaaaaggccgcgttgctggcgtttttccataggctccgcccccctgacgagcatcacaaaaatcgacgctcaagtcagaggtggcgaaacccgacaggactataaagataccaggcgtttccccctggaagctccctcgtgcgctctcctgttccgaccctgccgcttaccggatacctgtccgcctttctcccttcgggaagcgtggcgctttctcatagctcacgctgtaggtatctcagttcggtgtaggtcgttcgctccaagctgggctgtgtgcacgaaccccccgttcagcccgaccgctgcgccttatccggtaactatcgtcttgagtccaacccggtaagacacgacttatcgccactggcagcagccactggtaacaggattagcagagcgaggtatgtaggcggtgctacagagttcttgaagtggtggcctaactacggctacactagaaggacagtatttggtatctgcgctctgctgaagccagttaccttcggaaaaagagttggtagctcttgatccggcaaacaaaccaccgctggtagcggtggtttttttgtttgcaagcagcagattacgcgcagaaaaaaaggatctcaagaagatcctttgatcttttctacggggtctgacgctcagtggaacgaaaactcacgttaagggattttggtcatgagattatcaaaaaggatcttcacctagatccttttaaattaaaaatgaagttttaaatcaatctaaagtatatatgagtaaacttggtctgacagttaccaatgcttaatcagtgaggcacctatctcagcgatctgtctatttcgttcatccatagttgcctgactccccgtcgtgtagataactacgatacgggagggcttaccatctggccccagtgctgcaatgataccgcgagacccacgctcaccggctccagatttatcagcaataaaccagccagccggaagggccgagcgcagaagtggtcctgcaactttatccgcctccatccagtctattaattgttgccgggaagctagagtaagtagttcgccagttaatagtttgcgcaacgttgttgccattgctacaggcatcgtggtgtcacgctcgtcgtttggtatggcttcattcagctccggttcccaacgatcaaggcgagttacatgatcccccatgttgtgcaaaaaagcggttagctccttcggtcctccgatcgttgtcagaagtaagttggccgcagtgttatcactcatggttatggcagcactgcataattctcttactgtcatgccatccgtaagatgcttttctgtgactggtgagtactcaaccaagtcattctgagaatagtgtatgcggcgaccgagttgctcttgcccggcgtcaatacgggataataccgcgccacatagcagaactttaaaagtgctcatcattggaaaacgttcttcggggcgaaaactctcaaggatcttaccgctgttgagatccagttcgatgtaacccactcgtgcacccaactgatcttcagcatcttttactttcaccagcgtttctgggtgagcaaaaacaggaaggcaaaatgccgcaaaaaagggaataagggcgacacggaaatgttgaatactcatactcttcctttttcaatattattgaagcatttatcagggttattgtctcatgagcggatacatatttgaatgtatttagaaaaataaacaaataggggttccgcgcacatttccccgaaaagtgccacctgacgcgccctgtagcggcgcattaagcgcggcgggtgtggtggttacgcgcagcgtgaccgctacacttgccagcgccctagcgcccgctcctttcgctttcttcccttcctttctcgccacgttcgccggctttccccgtcaagctctaaatcgggggctccctttagggttccgatttagtgctttacggcacctcgaccccaaaaaacttgattagggtgatggttcacgtagtgggccatcgccctgatagacggtttttcgccctttgacgttggagtccacgttctttaatagtggactcttgttccaaactggaacaacactcaaccctatctcggtctattcttttgatttataagggattttgccgatttcggcctattggttaaaaaatgagctgatttaacaaaaatttaacgcgaattttaacaaaatattaacgcttacaatttccattcgccattcaggctgcgcaactgttgggaagggcgatcggtgcgggcctcttcgctattacgccagctggcgaaagggggatgtgctgcaaggcgattaagttgggtaacgccagggttttcccagtcacgacgttgtaaaacgacggccagtgaattgtaatacgactcactatagggcgaattgggtaccgggccccccctcgaggtcgatggtgtcgataagcttgatatcgaattcatgtcacacaaaccgatcttcgcctcaaggaaacctaattctacatccgagagactgccgagatccagtctacactgattaattttcgggccaataatttaaaaaaatcgtgttatataatattatatgtattatatatatacatcatgatgatactgacagtcatgtcccattgctaaatagacagactccatctgccgcctccaactgatgttctcaatatttaaggggtcatctcgcattgtttaataataaacagactccatctaccgcctccaaatgatgttctcaaaatatattgtatgaacttatttttattacttagtattattagacaacttacttgctttatgaaaaacacttcctatttaggaaacaatttataatggcagttcgttcatttaacaatttatgtagaataaatgttataaatgcgtatgggaaatcttaaatatggatagcataaatgatatctgcattgcctaattcgaaatcaacagcaacgaaaaaaatcccttgtacaacataaatagtcatcgagaaatatcaactatcaaagaacagctattcacacgttactattgagattattattggacgagaatcacacactcaactgtctttctctcttctagaaatacaggtacaagtatgtactattctcattgttcatacttctagtcatttcatcccacatattccttggatttctctccaatgaatgacattctatcttgcaaattcaacaattataataagatataccaaagtagcggtatagtggcaatcaaaaagcttctctggtgtgcttctcgtatttatttttattctaatgatccattaaaggtatatatttatttcttgttatataatccttttgtttattacatgggctggatacataaaggtattttgatttaattttttgcttaaattcaatcccccctcgttcagtgtcaactgtaatggtaggaaattaccatacttttgaagaagcaaaaaaaatgaaagaaaaaaaaaatcgtatttccaggttagacgttccgcagaatctagaatgcggtatgcggtacattgttcttcgaacgtaaaagttgcgctccctgagatattgtacatttttgcttttacaagtacaagtacatcgtacaactatgtactactgttgatgcatccacaacagtttgttttgtttttttttgttttttttttttctaatgattcattaccgctatgtatacctacttgtacttgtagtaagccgggttattggcgttcaattaatcatagacttatgaatctgcacggtgtgcgctgcgagttacttttagcttatgcatgctacttgggtgtaatattgggatctgttcggaaatcaacggatgctcaatcgatttcgacagtaattaattaagtcatacacaagtcagctttcttcgagcctcatataagtataagtagttcaacgtattagcactgtacccagcatctccgtatcgagaaacacaacaacatgccccattggacagatcatgcggatacacaggttgtgcagtatcatacatactcgatcagacaggtcgtctgaccatcatacaagctgaacaagcgctccatacttgcacgctctctatatacacagttaaattacatatccatagtctaacctctaacagttaatcttctggtaagcctcccagccagccttctggtatcgcttggcctcctcaataggatctcggttctggccgtacagacctcggccgacaattatgatatccgttccggtagacatgacatcctcaacagttcggtactgctgtccgagagcgtctcccttgtcgtcaagacccaccccgggggtcagaataagccagtcctcagagtcgcccttaggtcggttctgggcaatgaagccaaccacaaactcggggtcggatcgggcaagctcaatggtctgcttggagtactcgccagtggccagagagcccttgcaagacagctcggccagcatgagcagacctctggccagcttctcgttgggagaggggactaggaactccttgtactgggagttctcgtagtcagagacgtcctccttcttctgttcagagacagtttcctcggcaccagctcgcaggccagcaatgattccggttccgggtacaccgtgggcgttggtgatatcggaccactcggcgattcggtgacaccggtactggtgcttgacagtgttgccaatatctgcgaactttctgtcctcgaacaggaagaaaccgtgcttaagagcaagttccttgagggggagcacagtgccggcgtaggtgaagtcgtcaatgatgtcgatatgggttttgatcatgcacacataaggtccgaccttatcggcaagctcaatgagctccttggtggtggtaacatccagagaagcacacaggttggttttcttggctgccacgagcttgagcactcgagcggcaaaggcggacttgtggacgttagctcgagcttcgtaggagggcattttggtggtgaagaggagactgaaataaatttagtctgcagaactttttatcggaaccttatctggggcagtgaagtatatgttatggtaatagttacgagttagttgaacttatagatagactggactatacggctatcggtccaaattagaaagaacgtcaatggctctctgggcgtcgcctttgccgacaaaaatgtgatcatgatgaaagccagcaatgacgttgcagctgatattgttgtcggccaaccgcgccgaaaacgcagctgtcagacccacagcctccaacgaagaatgtatcgtcaaagtgatccaagcacactcatagttggagtcgtactccaaaggcggcaatgacgagtcagacagatactcgtcgaaaacagtgtacgcagatctactatagaggaacatttaaattgccccggagaagacggccaggccgcctagatgacaaattcaacaactcacagctgactttctgccattgccactaggggggggcctttttatatggccaagccaagctctccacgtcggttgggctgcacccaacaataaatgggtagggttgcaccaacaaagggatgggatggggggtagaagatacgaggataacggggctcaatggcacaaataagaacgaatactgccattaagactcgtgatccagcgactgacaccattgcatcatctaagggcctcaaaactacctcggaactgctgcgctgatctggacaccacagaggttccgagcactttaggttgcaccaaatgtcccaccaggtgcaggcagaaaacgctggaacagcgtgtacagtttgtcttaacaaaaagtgagggcgctgaggtcgagcagggtggtgtgacttgttatagcctttagagctgcgaaagcgcgtatggatttggctcatcaggccagattgagggtctgtggacacatgtcatgttagtgtacttcaatcgccccctggatatagccccgacaataggccgtggcctcatttttttgccttccgcacatttccattgctcggtacccacaccttgcttctcctgcacttgccaaccttaatactggtttacattgaccaacatcttacaagcggggggcttgtctagggtatatataaacagtggctctcccaatcggttgccagtctcttttttcctttctttccccacagattcgaaatctaaactacacatcacagaattccgagccgtgagtatccacgacaagatcagtgtcgagacgacgcgttttgtgtaatgacacaatccgaaagtcgctagcaacacacactctctacacaaactaacccagctctggtaccatggaagtccgacgacgaaaaatcgacgtgctcaaggcccagaaaaacggctacgaatcgggcccaccatctcgacaatcgtcgcagccctcctcaagagcatcgtccagaacccgcaacaaacactcctcgtccaccctgtcgctcagcggactgaccatgaaagtccagaagaaacctgcgggacccccggcgaactccaaaacgccattcctacacatcaagcccgtgcacacgtgctgctccacatcaatgctttcgcgcgattatgacggctccaaccccagcttcaagggcttcaaaaacatcggcatgatcattctcattgtgggaaatctacggctcgcattcgaaaactacctcaaatacggcatttccaacccgttcttcgaccccaaaattactccttccgagtggcagctctcaggcttgctcatagtcgtggcctacgcacatatcctcatggcctacgctattgagagcgctgccaagctgctgttcctctctagcaaacaccactacatggccgtggggcttctgcataccatgaacactttgtcgtccatctcgttgctgtcctacgtcgtctactactacctgcccaaccccgtggcaggcacaatagtcgagtttgtggccgttattctgtctctcaaactcgcctcatacgccctcactaactcggatctccgaaaagccgcaattcatgcccagaagctcgacaagacgcaagacgataacgaaaaggaatccacctcgtcttcctcttcttcagatgacgcagagactttggcagacattgacgtcattcctgcatactacgcacagctgccctacccccagaatgtgacgctgtcgaacctgctgtacttctggtttgctcccacactggtctaccagcccgtgtaccccaagacggagcgtattcgacccaagcacgtgatccgaaacctgtttgagctcgtctctctgtgcatgcttattcagtttctcatcttccagtacgcctaccccatcatgcagtcgtgtctggctctgttcttccagcccaagctcgattatgccaacatctccgagcgcctcatgaagttggcctccgtgtctatgatggtctggctcattggattctacgctttcttccagaacggtctcaatcttattgccgagctcacctgttttggaaacagaaccttctaccagcagtggtggaattcccgctccattggccagtactggactctatggaacaagccagtcaaccagtactttagacaccacgtctacgtgcctcttctcgctcggggcatgtcgcggttcaatgcgtcggtggtggttttctttttctccgccgtcatccatgaactgcttgtcggcatccccactcacaacatcatcggagccgccttcttcggcatgatgtcgcaggtgcctctgatcatggctactgagaaccttcagcatattaactcctctctgggccccttccttggcaactgtgcattctggttcacctttttcctgggacaacccacttgtgcattcctttattatctggcttacaactacaagcagaaccagtaggc

SEQ ID NO: 20 - DNA, 8532 bp, Artificial Sequence
  Plasmid pFBAIN-YLDGAT2
ggccgcaagtgtggatggggaagtgagtgcccggttctgtgtgcacaattggcaatccaagatggatggattcaacacagggatatagcgagctacgtggtggtgcgaggatatagcaacggatatttatgtttgacacttgagaatgtacgatacaagcactgtccaagtacaatactaaacatactgtacatactcatactcgtacccgggcaacggtttcacttgagtgcagtggctagtgctcttactcgtacagtgtgcaatactgcgtatcatagtctttgatgtatatcgtattcattcatgttagttgcgtacgagccggaagcataaagtgtaaagcctggggtgcctaatgagtgagctaactcacattaattgcgttgcgctcactgcccgctttccagtcgggaaacctgtcgtgccagctgcattaatgaatcggccaacgcgcggggagaggcggtttgcgtattgggcgctcttccgcttcctcgctcactgactcgctgcgctcggtcgttcggctgcggcgagcggtatcagctcactcaaaggcggtaatacggttatccacagaatcaggggataacgcaggaaagaacatgtgagcaaaaggccagcaaaaggccaggaaccgtaaaaaggccgcgttgctggcgtttttccataggctccgcccccctgacgagcatcacaaaaatcgacgctcaagtcagaggtggcgaaacccgacaggactataaagataccaggcgtttccccctggaagctccctcgtgcgctctcctgttccgaccctgccgcttaccggatacctgtccgcctttctcccttcgggaagcgtggcgctttctcatagctcacgctgtaggtatctcagttcggtgtaggtcgttcgctccaagctgggctgtgtgcacgaaccccccgttcagcccgaccgctgcgccttatccggtaactatcgtcttgagtccaacccggtaagacacgacttatcgccactggcagcagccactggtaacaggattagcagagcgaggtatgtaggcggtgctacagagttcttgaagtggtggcctaactacggctacactagaaggacagtatttggtatctgcgctctgctgaagccagttaccttcggaaaaagagttggtagctcttgatccggcaaacaaaccaccgctggtagcggtggtttttttgtttgcaagcagcagattacgcgcagaaaaaaaggatctcaagaagatcctttgatcttttctacggggtctgacgctcagtggaacgaaaactcacgttaagggattttggtcatgagattatcaaaaaggatcttcacctagatccttttaaattaaaaatgaagttttaaatcaatctaaagtatatatgagtaaacttggtctgacagttaccaatgcttaatcagtgaggcacctatctcagcgatctgtctatttcgttcatccatagttgcctgactccccgtcgtgtagataactacgatacgggagggcttaccatctggccccagtgctgcaatgataccgcgagacccacgctcaccggctccagatttatcagcaataaaccagccagccggaagggccgagcgcagaagtggtcctgcaactttatccgcctccatccagtctattaattgttgccgggaagctagagtaagtagttcgccagttaatagtttgcgcaacgttgttgccattgctacaggcatcgtggtgtcacgctcgtcgtttggtatggcttcattcagctccggttcccaacgatcaaggcgagttacatgatcccccatgttgtgcaaaaaagcggttagctccttcggtcctccgatcgttgtcagaagtaagttggccgcagtgttatcactcatggttatggcagcactgcataattctcttactgtcatgccatccgtaagatgcttttctgtgactggtgagtactcaaccaagtcattctgagaatagtgtatgcggcgaccgagttgctcttgcccggcgtcaatacgggataataccgcgccacatagcagaactttaaaagtgctcatcattggaaaacgttcttcggggcgaaaactctcaaggatcttaccgctgttgagatccagttcgatgtaacccactcgtgcacccaactgatcttcagcatcttttactttcaccagcgtttctgggtgagcaaaaacaggaaggcaaaatgccgcaaaaaagggaataagggcgacacggaaatgttgaatactcatactcttcctttttcaatattattgaagcatttatcagggttattgtctcatgagcggatacatatttgaatgtatttagaaaaataaacaaataggggttccgcgcacatttccccgaaaagtgccacctgacgcgccctgtagcggcgcattaagcgcggcgggtgtggtggttacgcgcagcgtgaccgctacacttgccagcgccctagcgcccgctcctttcgctttcttcccttcctttctcgccacgttcgccggctttccccgtcaagctctaaatcgggggctccctttagggttccgatttagtgctttacggcacctcgaccccaaaaaacttgattagggtgatggttcacgtagtgggccatcgccctgatagacggtttttcgccctttgacgttggagtccacgttctttaatagtggactcttgttccaaactggaacaacactcaaccctatctcggtctattcttttgatttataagggattttgccgatttcggcctattggttaaaaaatgagctgatttaacaaaaatttaacgcgaattttaacaaaatattaacgcttacaatttccattcgccattcaggctgcgcaactgttgggaagggcgatcggtgcgggcctcttcgctattacgccagctggcgaaagggggatgtgctgcaaggcgattaagttgggtaacgccagggttttcccagtcacgacgttgtaaaacgacggccagtgaattgtaatacgactcactatagggcgaattgggtaccgggccccccctcgaggtcgatggtgtcgataagcttgatatcgaattcatgtcacacaaaccgatcttcgcctcaaggaaacctaattctacatccgagagactgccgagatccagtctacactgattaattttcgggccaataatttaaaaaaatcgtgttatataatattatatgtattatatatatacatcatgatgatactgacagtcatgtcccattgctaaatagacagactccatctgccgcctccaactgatgttctcaatatttaaggggtcatctcgcattgtttaataataaacagactccatctaccgcctccaaatgatgttctcaaaatatattgtatgaacttatttttattacttagtattattagacaacttacttgctttatgaaaaacacttcctatttaggaaacaatttataatggcagttcgttcatttaacaatttatgtagaataaatgttataaatgcgtatgggaaatcttaaatatggatagcataaatgatatctgcattgcctaattcgaaatcaacagcaacgaaaaaaatcccttgtacaacataaatagtcatcgagaaatatcaactatcaaagaacagctattcacacgttactattgagattattattggacgagaatcacacactcaactgtctttctctcttctagaaatacaggtacaagtatgtactattctcattgttcatacttctagtcatttcatcccacatattccttggatttctctccaatgaatgacattctatcttgcaaattcaacaattataataagatataccaaagtagcggtatagtggcaatcaaaaagcttctctggtgtgcttctcgtatttatttttattctaatgatccattaaaggtatatatttatttcttgttatataatccttttgtttattacatgggctggatacataaaggtattttgatttaattttttgcttaaattcaatcccccctcgttcagtgtcaactgtaatggtaggaaattaccatacttttgaagaagcaaaaaaaatgaaagaaaaaaaaaatcgtatttccaggttagacgttccgcagaatctagaatgcggtatgcggtacattgttcttcgaacgtaaaagttgcgctccctgagatattgtacatttttgcttttacaagtacaagtacatcgtacaactatgtactactgttgatgcatccacaacagtttgttttgtttttttttgttttttttttttctaatgattcattaccgctatgtatacctacttgtacttgtagtaagccgggttattggcgttcaattaatcatagacttatgaatctgcacggtgtgcgctgcgagttacttttagcttatgcatgctacttgggtgtaatattgggatctgttcggaaatcaacggatgctcaatcgatttcgacagtaattaattaagtcatacacaagtcagctttcttcgagcctcatataagtataagtagttcaacgtattagcactgtacccagcatctccgtatcgagaaacacaacaacatgccccattggacagatcatgcggatacacaggttgtgcagtatcatacatactcgatcagacaggtcgtctgaccatcatacaagctgaacaagcgctccatacttgcacgctctctatatacacagttaaattacatatccatagtctaacctctaacagttaatcttctggtaagcctcccagccagccttctggtatcgcttggcctcctcaataggatctcggttctggccgtacagacctcggccgacaattatgatatccgttccggtagacatgacatcctcaacagttcggtactgctgtccgagagcgtctcccttgtcgtcaagacccaccccgggggtcagaataagccagtcctcagagtcgcccttaggtcggttctgggcaatgaagccaaccacaaactcggggtcggatcgggcaagctcaatggtctgcttggagtactcgccagtggccagagagcccttgcaagacagctcggccagcatgagcagacctctggccagcttctcgttgggagaggggactaggaactccttgtactgggagttctcgtagtcagagacgtcctccttcttctgttcagagacagtttcctcggcaccagctcgcaggccagcaatgattccggttccgggtacaccgtgggcgttggtgatatcggaccactcggcgattcggtgacaccggtactggtgcttgacagtgttgccaatatctgcgaactttctgtcctcgaacaggaagaaaccgtgcttaagagcaagttccttgagggggagcacagtgccggcgtaggtgaagtcgtcaatgatgtcgatatgggttttgatcatgcacacataaggtccgaccttatcggcaagctcaatgagctccttggtggtggtaacatccagagaagcacacaggttggttttcttggctgccacgagcttgagcactcgagcggcaaaggcggacttgtggacgttagctcgagcttcgtaggagggcattttggtggtgaagaggagactgaaataaatttagtctgcagaactttttatcggaaccttatctggggcagtgaagtatatgttatggtaatagttacgagttagttgaacttatagatagactggactatacggctatcggtccaaattagaaagaacgtcaatggctctctgggcgtcgcctttgccgacaaaaatgtgatcatgatgaaagccagcaatgacgttgcagctgatattgttgtcggccaaccgcgccgaaaacgcagctgtcagacccacagcctccaacgaagaatgtatcgtcaaagtgatccaagcacactcatagttggagtcgtactccaaaggcggcaatgacgagtcagacagatactcgtcgaaaacagtgtacgcagatctactatagaggaacatttaaattgccccggagaagacggccaggccgcctagatgacaaattcaacaactcacagctgactttctgccattgccactaggggggggcctttttatatggccaagccaagctctccacgtcggttgggctgcacccaacaataaatgggtagggttgcaccaacaaagggatgggatggggggtagaagatacgaggataacggggctcaatggcacaaataagaacgaatactgccattaagactcgtgatccagcgactgacaccattgcatcatctaagggcctcaaaactacctcggaactgctgcgctgatctggacaccacagaggttccgagcactttaggttgcaccaaatgtcccaccaggtgcaggcagaaaacgctggaacagcgtgtacagtttgtcttaacaaaaagtgagggcgctgaggtcgagcagggtggtgtgacttgttatagcctttagagctgcgaaagcgcgtatggatttggctcatcaggccagattgagggtctgtggacacatgtcatgttagtgtacttcaatcgccccctggatatagccccgacaataggccgtggcctcatttttttgccttccgcacatttccattgctcggtacccacaccttgcttctcctgcacttgccaaccttaatactggtttacattgaccaacatcttacaagcggggggcttgtctagggtatatataaacagtggctctcccaatcggttgccagtctcttttttcctttctttccccacagattcgaaatctaaactacacatcacagaattccgagccgtgagtatccacgacaagatcagtgtcgagacgacgcgttttgtgtaatgacacaatccgaaagtcgctagcaacacacactctctacacaaactaacccagctctggtaccatggctatcgactcacaatactacaagtcgcgagacaaaaacgacacggcacccaaaatcgcgggaatccgatatgccccgctatcgacaccattactcaaccgatgtgagaccttctctctggtctggcacattttcagcattcccactttcctcacaattttcatgctatgctgcgcaattccactgctctggccatttgtgattgcgtatgtagtgtacgctgttaaagacgactccccgtccaacggaggagtggtcaagcgatactcgcctatttcaagaaacttcttcatctggaagctctttggccgctacttccccataactctgcacaagacggtggatctggagcccacgcacacatactaccctctggacgtccaggagtatcacctgattgctgagagatactggccgcagaacaagtacctccgagcaatcatctccaccatcgagtactttctgcccgccttcatgaaacggtctctttctatcaacgagcaggagcagcctgccgagcgagatcctctcctgtctcccgtttctcccagctctccgggttctcaacctgacaagtggattaaccacgacagcagatatagccgtggagaatcatctggctccaacggccacgcctcgggctccgaacttaacggcaacggcaacaatggcaccactaaccgacgacctttgtcgtccgcctctgctggctccactgcatctgattccacgcttcttaacgggtccctcaactcctacgccaaccagatcattggcgaaaacgacccacagctgtcgcccacaaaactcaagcccactggcagaaaatacatcttcggctaccacccccacggcattatcggcatgggagcctttggtggaattgccaccgagggagctggatggtccaagctctttccgggcatccctgtttctcttatgactctcaccaacaacttccgagtgcctctctacagagagtacctcatgagtctgggagtcgcttctgtctccaagaagtcctgcaaggccctcctcaagcgaaaccagtctatctgcattgtcgttggtggagcacaggaaagtcttctggccagacccggtgtcatggacctggtgctactcaagcgaaagggttttgttcgacttggtatggaggtcggaaatgtcgcccttgttcccatcatggcctttggtgagaacgacctctatgaccaggttagcaacgacaagtcgtccaagctgtaccgattccagcagtttgtcaagaacttccttggattcacccttcctttgatgcatgcccgaggcgtcttcaactacgatgtcggtcttgtcccctacaggcgacccgtcaacattgtggttggttcccccattgacttgccttatctcccacaccccaccgacgaagaagtgtccgaataccacgaccgatacatcgccgagctgcagcgaatctacaacgagcacaaggatgaatatttcatcgattggaccgaggagggcaaaggagccccagagttccgaatgattgagtaagc

SEQ ID NO: 21 - DNA, 7049 bp, Artificial Sequence
  Plasmid pKS123
agcttggatccgtcgacggcgcgcccgatcatccggatatagttcctcctttcagcaaaaaacccctcaagacccgtttagaggccccaaggggttatgctagttattgctcagcggtggcagcagccaactcagcttcctttcgggctttgttagcagccggatcgatccaagctgtacctcactattcctttgccctcggacgagtgctggggcgtcggtttccactatcggcgagtacttctacacagccatcggtccagacggccgcgcttctgcgggcgatttgtgtacgcccgacagtcccggctccggatcggacgattgcgtcgcatcgaccctgcgcccaagctgcatcatcgaaattgccgtcaaccaagctctgatagagttggtcaagaccaatgcggagcatatacgcccggagccgcggcgatcctgcaagctccggatgcctccgctcgaagtagcgcgtctgctgctccatacaagccaaccacggcctccagaagaagatgttggcgacctcgtattgggaatccccgaacatcgcctcgctccagtcaatgaccgctgttatgcggccattgtccgtcaggacattgttggagccgaaatccgcgtgcacgaggtgccggacttcggggcagtcctcggcccaaagcatcagctcatcgagagcctgcgcgacggacgcactgacggtgtcgtccatcacagtttgccagtgatacacatggggatcagcaatcgcgcatatgaaatcacgccatgtagtgtattgaccgattccttgcggtccgaatgggccgaacccgctcgtctggctaagatcggccgcagcgatcgcatccatagcctccgcgaccggctgcagaacagcgggcagttcggtttcaggcaggtcttgcaacgtgacaccctgtgcacggcgggagatgcaataggtcaggctctcgctgaattccccaatgtcaagcacttccggaatcgggagcgcggccgatgcaaagtgccgataaacataacgatctttgtagaaaccatcggcgcagctatttacccgcaggacatatccacgccctcctacatcgaagctgaaagcacgagattcttcgccctccgagagctgcatcaggtcggagacgctgtcgaacttttcgatcagaaacttctcgacagacgtcgcggtgagttcaggcttttccatgggtatatctccttcttaaagttaaacaaaattatttctagagggaaaccgttgtggtctccctatagtgagtcgtattaatttcgcgggatcgagatcgatccaattccaatcccacaaaaatctgagcttaacagcacagttgctcctctcagagcagaatcgggtattcaacaccctcatatcaactactacgttgtgtataacggtccacatgccggtatatacgatgactggggttgtacaaaggcggcaacaaacggcgttcccggagttgcacacaagaaatttgccactattacagaggcaagagcagcagctgacgcgtacacaacaagtcagcaaacagacaggttgaacttcatccccaaaggagaagctcaactcaagcccaagagctttgctaaggccctaacaagcccaccaaagcaaaaagcccactggctcacgctaggaaccaaaaggcccagcagtgatccagccccaaaagagatctcctttgccccggagattacaatggacgatttcctctatctttacgatctaggaaggaagttcgaaggtgaaggtgacgacactatgttcaccactgataatgagaaggttagcctcttcaatttcagaaagaatgctgacccacagatggttagagaggcctacgcagcaggtctcatcaagacgatctacccgagtaacaatctccaggagatcaaataccttcccaagaaggttaaagatgcagtcaaaagattcaggactaattgcatcaagaacacagagaaagacatatttctcaagatcagaagtactattccagtatggacgattcaaggcttgcttcataaaccaaggcaagtaatagagattggagtctctaaaaaggtagttcctactgaatctaaggccatgcatggagtctaagattcaaatcgaggatctaacagaactcgccgtgaagactggcgaacagttcatacagagtcttttacgactcaatgacaagaagaaaatcttcgtcaacatggtggagcacgacactctggtctactccaaaaatgtcaaagatacagtctcagaagaccaaagggctattgagacttttcaacaaaggataatttcgggaaacctcctcggattccattgcccagctatctgtcacttcatcgaaaggacagtagaaaaggaaggtggctcctacaaatgccatcattgcgataaaggaaaggctatcattcaagatgcctctgccgacagtggtcccaaagatggacccccacccacgaggagcatcgtggaaaaagaagacgttccaaccacgtcttcaaagcaagtggattgatgtgacatctccactgacgtaagggatgacgcacaatcccactatccttcgcaagacccttcctctatataaggaagttcatttcatttggagaggacacgctcgagctcatttctctattacttcagccataacaaaagaactcttttctcttcttattaaaccatgaaaaagcctgaactcaccgcgacgtctgtcgagaagtttctgatcgaaaagttcgacagcgtctccgacctgatgcagctctcggagggcgaagaatctcgtgctttcagcttcgatgtaggagggcgtggatatgtcctgcgggtaaatagctgcgccgatggtttctacaaagatcgttatgtttatcggcactttgcatcggccgcgctcccgattccggaagtgcttgacattggggaattcagcgagagcctgacctattgcatctcccgccgtgcacagggtgtcacgttgcaagacctgcctgaaaccgaactgcccgctgttctgcagccggtcgcggaggccatggatgcgatcgctgcggccgatcttagccagacgagcgggttcggcccattcggaccgcaaggaatcggtcaatacactacatggcgtgatttcatatgcgcgattgctgatccccatgtgtatcactggcaaactgtgatggacgacaccgtcagtgcgtccgtcgcgcaggctctcgatgagctgatgctttgggccgaggactgccccgaagtccggcacctcgtgcacgcggatttcggctccaacaatgtcctgacggacaatggccgcataacagcggtcattgactggagcgaggcgatgttcggggattcccaatacgaggtcgccaacatcttcttctggaggccgtggttggcttgtatggagcagcagacgcgctacttcgagcggaggcatccggagcttgcaggatcgccgcggctccgggcgtatatgctccgcattggtcttgaccaactctatcagagcttggttgacggcaatttcgatgatgcagcttgggcgcagggtcgatgcgacgcaatcgtccgatccggagccgggactgtcgggcgtacacaaatcgcccgcagaagcgcggccgtctggaccgatggctgtgtagaagtactcgccgatagtggaaaccgacgccccagcactcgtccgagggcaaaggaatagtgaggtacctaaagaaggagtgcgtcgaagcagatcgttcaaacatttggcaataaagtttcttaagattgaatcctgttgccggtcttgcgatgattatcatataatttctgttgaattacgttaagcatgtaataattaacatgtaatgcatgacgttatttatgagatgggtttttatgattagagtcccgcaattatacatttaatacgcgatagaaaacaaaatatagcgcgcaaactaggataaattatcgcgcgcggtgtcatctatgttactagatcgatgtcgaatctgatcaacctgcattaatgaatcggccaacgcgcggggagaggcggtttgcgtattgggcgctcttccgcttcctcgctcactgactcgctgcgctcggtcgttcggctgcggcgagcggtatcagctcactcaaaggcggtaatacggttatccacagaatcaggggataacgcaggaaagaacatgtgagcaaaaggccagcaaaaggccaggaaccgtaaaaaggccgcgttgctggcgtttttccataggctccgcccccctgacgagcatcacaaaaatcgacgctcaagtcagaggtggcgaaacccgacaggactataaagataccaggcgtttccccctggaagctccctcgtgcgctctcctgttccgaccctgccgcttaccggatacctgtccgcctttctcccttcgggaagcgtggcgctttctcaatgctcacgctgtaggtatctcagttcggtgtaggtcgttcgctccaagctgggctgtgtgcacgaaccccccgttcagcccgaccgctgcgccttatccggtaactatcgtcttgagtccaacccggtaagacacgacttatcgccactggcagcagccactggtaacaggattagcagagcgaggtatgtaggcggtgctacagagttcttgaagtggtggcctaactacggctacactagaaggacagtatttggtatctgcgctctgctgaagccagttaccttcggaaaaagagttggtagctcttgatccggcaaacaaaccaccgctggtagcggtggtttttttgtttgcaagcagcagattacgcgcagaaaaaaaggatctcaagaagatcctttgatcttttctacggggtctgacgctcagtggaacgaaaactcacgttaagggattttggtcatgacattaacctataaaaataggcgtatcacgaggccctttcgtctcgcgcgtttcggtgatgacggtgaaaacctctgacacatgcagctcccggagacggtcacagcttgtctgtaagcggatgccgggagcagacaagcccgtcagggcgcgtcagcgggtgttggcgggtgtcggggctggcttaactatgcggcatcagagcagattgtactgagagtgcaccatatggacatattgtcgttagaacgcggctacaattaatacataaccttatgtatcatacacatacgatttaggtgacactatagaacggcgcgccaagcttttgatccatgcccttcatttgccgcttattaattaatttggtaacagtccgtactaatcagttacttatccttcccccatcataattaatcttggtagtctcgaatgccacaacactgactagtctcttggatcataagaaaaagccaaggaacaaaagaagacaaaacacaatgagagtatcctttgcatagcaatgtctaagttcataaaattcaaacaaaaacgcaatcacacacagtggacatcacttatccactagctgatcaggatcgccgcgtcaagaaaaaaaaactggaccccaaaagccatgcacaacaacacgtactcacaaaggtgtcaatcgagcagcccaaaacattcaccaactcaacccatcatgagccctcacatttgttgtttctaacccaacctcaaactcgtattctcttccgccacctcatttttgtttatttcaacacccgtcaaactgcatgccaccccgtggccaaatgtccatgcatgttaacaagacctatgactataaatagctgcaatctcggcccaggttttcatcatcaagaaccagttcaatatcctagtacaccgtattaaagaatttaagatatactgcggccgcaagtatgaactaaaatgcatgtaggtgtaagagctcatggagagcatggaatattgtatccgaccatgtaacagtataataactgagctccatctcacttcttctatgaataaacaaaggatgttatgatatattaacactctatctatgcaccttattgttctatgataaatttcctcttattattataaatcatctgaatcgtgacggcttatggaatgcttcaaatagtacaaaaacaaatgtgtactataagactttctaaacaattctaaccttagcattgtgaacgagacataagtgttaagaagacataacaattataatggaagaagtttgtctccatttatatattatatattacccacttatgtattatattaggatgttaaggagacataacaattataaagagagaagtttgtatccatttatatattatatactacccatttatatattatacttatccacttatttaatgtctttataaggtttgatccatgatatttctaatattttagttgatatgtatatgaaagggtactatttgaactctcttactctgtataaaggttggatcatccttaaagtgggtctatttaattttattgcttcttacagataaaaaaaaaattatgagttggtttgataaaatattgaaggatttaaaataataataaataacatataatatatgtatataaatttattataatataacatttatctataaaaaagtaaatattgtcataaatctatacaatcgtttagccttgctggacgaatctcaattatttaaacgagagtaaacatatttgactttttggttatttaacaaattattatttaacactatatgaaatttttttttttatcagcaaagaataaaattaaattaagaaggacaatggtgtcccaatccttatacaaccaacttccacaagaaagtcaagtcagagacaacaaaaaaacaagcaaaggaaattttttaatttgagttgtcttgtttgctgcataatttatgcagtaaaacactacacataacccttttagcagtagagcaatggttgaccgtgtgcttagcttcttttattttatttttttatcagcaaagaataaataaaataaaatgagacacttcagggatgtttcaaca

SEQ ID NO: 22 - DNA, 1098 bp, Artificial Sequence
  DNA fragment cal a24-4
aggatcctgcaggcagccaagaaggttttggagcgagttccaatctcaaaaccgccattcgaatacaatgatctgaagaaagcagtaccaccacattgtttttcacgaccactttcccgatccttgtatttcctctttcacgacattattgtaacatgtatccttttctacgtagcatcaaactacattcatatgctccctcgtttcctttcctgcatcgtatggcctgtttactggatctcccaaggagtttttctcggcagattgtggatgatcggccacgaatgcggtcatcatagcttcagtaattaccgttgggtcgacgatacagtcggttttctaatccatacggccaccctcactccctatttttccttcaaatatagccaccgtaatcaccatgcacacaccaattccatggaatacgacgaggttcatatcccgaaacgcaaatcagaagctctctactttgaatttctgggcaacaacccaatcggcttaatgatcaccatgctatgtaaactgactttcggatatgcagcttacattatgttcaattacacaggtaagaagcacaaatctgggggcttagcgagccacttctacccacaaagccctctctttaacgacagcgaacgtaaccatgttttgttctctgacatcgggatttgcatcgtcttgtacgcgtgttaccgtattgtgacggtcacaggggcaatgccggcattttatgtgtacggtattccttgggttataatgagtgctattctctttgcagcaacttatttacaacacactcatccttcaatccctcattatgatacaacggagtggaactggcttagaggggctttatcgacaattgatagagatttagggttcttcaacatgaacaaaacacattatcatgttatccaccatttgtttcctgtcattccggaataccatgcacaagaggcaaccgaggccatcaagcccatcttaggtcaatattacaagtatgatggtactccgtttctaaaggccttgtggagagaaatgaaggagtgtatttatgtagaatccgatgaaggtcagaagaaacctgcaggagatctt

SEQ ID NO: 23 - DNA, 30 bp, Artificial Sequence
  Primer oCal-15
aggatcctgcaggcagccaagaaggttttg

SEQ ID NO: 24 - DNA, 29 bp, Artificial Sequence
  Primer oCal-6
aagatctcctgcaggtttcttctgacctc

SEQ ID NO: 25 - DNA, 8138 bp, Artificial Sequence
  Plasmid pKR53B
gatccgtcgacggcgcgcccgatcatccggatatagttcctcctttcagcaaaaaacccctcaagacccgtttagaggccccaaggggttatgctagttattgctcagcggtggcagcagccaactcagcttcctttcgggctttgttagcagccggatcgatccaagctgtacctcactattcctttgccctcggacgagtgctggggcgtcggtttccactatcggcgagtacttctacacagccatcggtccagacggccgcgcttctgcgggcgatttgtgtacgcccgacagtcccggctccggatcggacgattgcgtcgcatcgaccctgcgcccaagctgcatcatcgaaattgccgtcaaccaagctctgatagagttggtcaagaccaatgcggagcatatacgcccggagccgcggcgatcctgcaagctccggatgcctccgctcgaagtagcgcgtctgctgctccatacaagccaaccacggcctccagaagaagatgttggcgacctcgtattgggaatccccgaacatcgcctcgctccagtcaatgaccgctgttatgcggccattgtccgtcaggacattgttggagccgaaatccgcgtgcacgaggtgccggacttcggggcagtcctcggcccaaagcatcagctcatcgagagcctgcgcgacggacgcactgacggtgtcgtccatcacagtttgccagtgatacacatggggatcagcaatcgcgcatatgaaatcacgccatgtagtgtattgaccgattccttgcggtccgaatgggccgaacccgctcgtctggctaagatcggccgcagcgatcgcatccatagcctccgcgaccggctgcagaacagcgggcagttcggtttcaggcaggtcttgcaacgtgacaccctgtgcacggcgggagatgcaataggtcaggctctcgctgaattccccaatgtcaagcacttccggaatcgggagcgcggccgatgcaaagtgccgataaacataacgatctttgtagaaaccatcggcgcagctatttacccgcaggacatatccacgccctcctacatcgaagctgaaagcacgagattcttcgccctccgagagctgcatcaggtcggagacgctgtcgaacttttcgatcagaaacttctcgacagacgtcgcggtgagttcaggcttttccatgggtatatctccttcttaaagttaaacaaaattatttctagagggaaaccgttgtggtctccctatagtgagtcgtattaatttcgcgggatcgagatcgatccaattccaatcccacaaaaatctgagcttaacagcacagttgctcctctcagagcagaatcgggtattcaacaccctcatatcaactactacgttgtgtataacggtccacatgccggtatatacgatgactggggttgtacaaaggcggcaacaaacggcgttcccggagttgcacacaagaaatttgccactattacagaggcaagagcagcagctgacgcgtacacaacaagtcagcaaacagacaggttgaacttcatccccaaaggagaagctcaactcaagcccaagagctttgctaaggccctaacaagcccaccaaagcaaaaagcccactggctcacgctaggaaccaaaaggcccagcagtgatccagccccaaaagagatctcctttgccccggagattacaatggacgatttcctctatctttacgatctaggaaggaagttcgaaggtgaaggtgacgacactatgttcaccactgataatgagaaggttagcctcttcaatttcagaaagaatgctgacccacagatggttagagaggcctacgcagcaggtctcatcaagacgatctacccgagtaacaatctccaggagatcaaataccttcccaagaaggttaaagatgcagtcaaaagattcaggactaattgcatcaagaacacagagaaagacatatttctcaagatcagaagtactattccagtatggacgattcaaggcttgcttcataaaccaaggcaagtaatagagattggagtctctaaaaaggtagttcctactgaatctaaggccatgcatggagtctaagattcaaatcgaggatctaacagaactcgccgtgaagactggcgaacagttcatacagagtcttttacgactcaatgacaagaagaaaatcttcgtcaacatggtggagcacgacactctggtctactccaaaaatgtcaaagatacagtctcagaagaccaaagggctattgagacttttcaacaaaggataatttcgggaaacctcctcggattccattgcccagctatctgtcacttcatcgaaaggacagtagaaaaggaaggtggctcctacaaatgccatcattgcgataaaggaaaggctatcattcaagatgcctctgccgacagtggtcccaaagatggacccccacccacgaggagcatcgtggaaaaagaagacgttccaaccacgtcttcaaagcaagtggattgatgtgacatctccactgacgtaagggatgacgcacaatcccactatccttcgcaagacccttcctctatataaggaagttcatttcatttggagaggacacgctcgagctcatttctctattacttcagccataacaaaagaactcttttctcttcttattaaaccatgaaaaagcctgaactcaccgcgacgtctgtcgagaagtttctgatcgaaaagttcgacagcgtctccgacctgatgcagctctcggagggcgaagaatctcgtgctttcagcttcgatgtaggagggcgtggatatgtcctgcgggtaaatagctgcgccgatggtttctacaaagatcgttatgtttatcggcactttgcatcggccgcgctcccgattccggaagtgcttgacattggggaattcagcgagagcctgacctattgcatctcccgccgtgcacagggtgtcacgttgcaagacctgcctgaaaccgaactgcccgctgttctgcagccggtcgcggaggccatggatgcgatcgctgcggccgatcttagccagacgagcgggttcggcccattcggaccgcaaggaatcggtcaatacactacatggcgtgatttcatatgcgcgattgctgatccccatgtgtatcactggcaaactgtgatggacgacaccgtcagtgcgtccgtcgcgcaggctctcgatgagctgatgctttgggccgaggactgccccgaagtccggcacctcgtgcacgcggatttcggctccaacaatgtcctgacggacaatggccgcataacagcggtcattgactggagcgaggcgatgttcggggattcccaatacgaggtcgccaacatcttcttctggaggccgtggttggcttgtatggagcagcagacgcgctacttcgagcggaggcatccggagcttgcaggatcgccgcggctccgggcgtatatgctccgcattggtcttgaccaactctatcagagcttggttgacggcaatttcgatgatgcagcttgggcgcagggtcgatgcgacgcaatcgtccgatccggagccgggactgtcgggcgtacacaaatcgcccgcagaagcgcggccgtctggaccgatggctgtgtagaagtactcgccgatagtggaaaccgacgccccagcactcgtccgagggcaaaggaatagtgaggtacctaaagaaggagtgcgtcgaagcagatcgttcaaacatttggcaataaagtttcttaagattgaatcctgttgccggtcttgcgatgattatcatataatttctgttgaattacgttaagcatgtaataattaacatgtaatgcatgacgttatttatgagatgggtttttatgattagagtcccgcaattatacatttaatacgcgatagaaaacaaaatatagcgcgcaaactaggataaattatcgcgcgcggtgtcatctatgttactagatcgatgtcgaatcgatcaacctgcattaatgaatcggccaacgcgcggggagaggcggtttgcgtattgggcgctcttccgcttcctcgctcactgactcgctgcgctcggtcgttcggctgcggcgagcggtatcagctcactcaaaggcggtaatacggttatccacagaatcaggggataacgcaggaaagaacatgtgagcaaaaggccagcaaaaggccaggaaccgtaaaaaggccgcgttgctggcgtttttccataggctccgcccccctgacgagcatcacaaaaatcgacgctcaagtcagaggtggcgaaacccgacaggactataaagataccaggcgtttccccctggaagctccctcgtgcgctctcctgttccgaccctgccgcttaccggatacctgtccgcctttctcccttcgggaagcgtggcgctttctcaatgctcacgctgtaggtatctcagttcggtgtaggtcgttcgctccaagctgggctgtgtgcacgaaccccccgttcagcccgaccgctgcgccttatccggtaactatcgtcttgagtccaacccggtaagacacgacttatcgccactggcagcagccactggtaacaggattagcagagcgaggtatgtaggcggtgctacagagttcttgaagtggtggcctaactacggctacactagaaggacagtatttggtatctgcgctctgctgaagccagttaccttcggaaaaagagttggtagctcttgatccggcaaacaaaccaccgctggtagcggtggtttttttgtttgcaagcagcagattacgcgcagaaaaaaaggatctcaagaagatcctttgatcttttctacggggtctgacgctcagtggaacgaaaactcacgttaagggattttggtcatgacattaacctataaaaataggcgtatcacgaggccctttcgtctcgcgcgtttcggtgatgacggtgaaaacctctgacacatgcagctcccggagacggtcacagcttgtctgtaagcggatgccgggagcagacaagcccgtcagggcgcgtcagcgggtgttggcgggtgtcggggctggcttaactatgcggcatcagagcagattgtactgagagtgcaccatatggacatattgtcgttagaacgcggctacaattaatacataaccttatgtatcatacacatacgatttaggtgacactatagaacggcgcgccaagcttttgatccatgcccttcatttgccgcttattaattaatttggtaacagtccgtactaatcagttacttatccttcccccatcataattaatcttggtagtctcgaatgccacaacactgactagtctcttggatcataagaaaaagccaaggaacaaaagaagacaaaacacaatgagagtatcctttgcatagcaatgtctaagttcataaaattcaaacaaaaacgcaatcacacacagtggacatcacttatccactagctgatcaggatcgccgcgtcaagaaaaaaaaactggaccccaaaagccatgcacaacaacacgtactcacaaaggtgtcaatcgagcagcccaaaacattcaccaactcaacccatcatgagccctcacatttgttgtttctaacccaacctcaaactcgtattctcttccgccacctcatttttgtttatttcaacacccgtcaaactgcatgccaccccgtggccaaatgtccatgcatgttaacaagacctatgactataaatagctgcaatctcggcccaggttttcatcatcaagaaccagttcaatatcctagtacaccgtattaaagaatttaagatatactgcggccgcaagtatgaactaaaatgcatgtaggtgtaagagctcatggagagcatggaatattgtatccgaccatgtaacagtataataactgagctccatctcacttcttctatgaataaacaaaggatgttatgatatattaacactctatctatgcaccttattgttctatgataaatttcctcttattattataaatcatctgaatcgtgacggcttatggaatgcttcaaatagtacaaaaacaaatgtgtactataagactttctaaacaattctaaccttagcattgtgaacgagacataagtgttaagaagacataacaattataatggaagaagtttgtctccatttatatattatatattacccacttatgtattatattaggatgttaaggagacataacaattataaagagagaagtttgtatccatttatatattatatactacccatttatatattatacttatccacttatttaatgtctttataaggtttgatccatgatatttctaatattttagttgatatgtatatgaaagggtactatttgaactctcttactctgtataaaggttggatcatccttaaagtgggtctatttaattttattgcttcttacagataaaaaaaaaattatgagttggtttgataaaatattgaaggatttaaaataataataaataacatataatatatgtatataaatttattataatataacatttatctataaaaaagtaaatattgtcataaatctatacaatcgtttagccttgctggacgaatctcaattatttaaacgagagtaaacatatttgactttttggttatttaacaaattattatttaacactatatgaaatttttttttttatcagcaaagaataaaattaaattaagaaggacaatggtgtcccaatccttatacaaccaacttccacaagaaagtcaagtcagagacaacaaaaaaacaagcaaaggaaattttttaatttgagttgtcttgtttgctgcataatttatgcagtaaaacactacacataacccttttagcagtagagcaatggttgaccgtgtgcttagcttcttttattttatttttttatcagcaaagaataaataaaataaaatgagacacttcagggatgtttcaacaagcttggatctcctgcaggtttcttctgaccttcatcggattctacataaatacactccttcatttctctccacaaggcctttagaaacggagtaccatcatacttgtaatattgacctaagatgggcttgatggcctcggttgcctcttgtgcatggtattccggaatgacaggaaacaaatggtggataacatgataatgtgttttgttcatgttgaagaaccctaaatctctatcaattgtcgataaagcccctctaagccagttccactccgttgtatcataatgagggattgaaggatgagtgtgttgtaaataagttgctgcaaagagaatagcactcattataacccaaggaataccgtacacataaaatgccggcattgcccctgtgaccgtcacaatacggtaacacgcgtacaagacgatgcaaatcccgatgtcagagaacaaaacatggttacgttcgctgtcgttaaagagagggctttgtgggtagaagtggctcgctaagcccccagatttgtgcttcttacctgtgtaattgaacataatgtaagctgcatatccgaaagtcagtttacatagcatggtgatcattaagccgattgggttgttgcccagaaattcaaagtagagagcttctgatttgcgtttcgggatatgaacctcgtcgtattccatggaattggtgtgtgcatggtgattacggtggctatatttgaaggaaaaatagggagtgagggtggccgtatggattagaaaaccgactgtatcgtcgacccaacggtaattactgaagctatgatgaccgcattcgtggccgatcatccacaatctgccgagaaaaactccttgggagatccagtaaacaggccatacgatgcaggaaaggaaacgagggagcatatgaatgtagtttgatgctacgtagaaaaggatacatgttacaataatgtcgtgaaagaggaaatacaaggatcgggaaagtggtcgtgaaaaacaatgtggtggtactgctttcttcagatcattgtattcgaatggcggttttgagattggaactcgctccaaaaccttcttggctgcctgcag

SEQ ID NO: 26 - DNA, 7085 bp, Artificial Sequence
  Plasmid pKR72
gtacggatccgtcgacggcgcgcccgatcatccggatatagttcctcctttcagcaaaaaacccctcaagacccgtttagaggccccaaggggttatgctagttattgctcagcggtggcagcagccaactcagcttcctttcgggctttgttagcagccggatcgatccaagctgtacctcactattcctttgccctcggacgagtgctggggcgtcggtttccactatcggcgagtacttctacacagccatcggtccagacggccgcgcttctgcgggcgatttgtgtacgcccgacagtcccggctccggatcggacgattgcgtcgcatcgaccctgcgcccaagctgcatcatcgaaattgccgtcaaccaagctctgatagagttggtcaagaccaatgcggagcatatacgcccggagccgcggcgatcctgcaagctccggatgcctccgctcgaagtagcgcgtctgctgctccatacaagccaaccacggcctccagaagaagatgttggcgacctcgtattgggaatccccgaacatcgcctcgctccagtcaatgaccgctgttatgcggccattgtccgtcaggacattgttggagccgaaatccgcgtgcacgaggtgccggacttcggggcagtcctcggcccaaagcatcagctcatcgagagcctgcgcgacggacgcactgacggtgtcgtccatcacagtttgccagtgatacacatggggatcagcaatcgcgcatatgaaatcacgccatgtagtgtattgaccgattccttgcggtccgaatgggccgaacccgctcgtctggctaagatcggccgcagcgatcgcatccatagcctccgcgaccggctgcagaacagcgggcagttcggtttcaggcaggtcttgcaacgtgacaccctgtgcacggcgggagatgcaataggtcaggctctcgctgaattccccaatgtcaagcacttccggaatcgggagcgcggccgatgcaaagtgccgataaacataacgatctttgtagaaaccatcggcgcagctatttacccgcaggacatatccacgccctcctacatcgaagctgaaagcacgagattcttcgccctccgagagctgcatcaggtcggagacgctgtcgaacttttcgatcagaaacttctcgacagacgtcgcggtgagttcaggcttttccatgggtatatctccttcttaaagttaaacaaaattatttctagagggaaaccgttgtggtctccctatagtgagtcgtattaatttcgcgggatcgagatcgatccaattccaatcccacaaaaatctgagcttaacagcacagttgctcctctcagagcagaatcgggtattcaacaccctcatatcaactactacgttgtgtataacggtccacatgccggtatatacgatgactggggttgtacaaaggcggcaacaaacggcgttcccggagttgcacacaagaaatttgccactattacagaggcaagagcagcagctgacgcgtacacaacaagtcagcaaacagacaggttgaacttcatccccaaaggagaagctcaactcaagcccaagagctttgctaaggccctaacaagcccaccaaagcaaaaagcccactggctcacgctaggaaccaaaaggcccagcagtgatccagccccaaaagagatctcctttgccccggagattacaatggacgatttcctctatctttacgatctaggaaggaagttcgaaggtgaaggtgacgacactatgttcaccactgataatgagaaggttagcctcttcaatttcagaaagaatgctgacccacagatggttagagaggcctacgcagcaggtctcatcaagacgatctacccgagtaacaatctccaggagatcaaataccttcccaagaaggttaaagatgcagtcaaaagattcaggactaattgcatcaagaacacagagaaagacatatttctcaagatcagaagtactattccagtatggacgattcaaggcttgcttcataaaccaaggcaagtaatagagattggagtctctaaaaaggtagttcctactgaatctaaggccatgcatggagtctaagattcaaatcgaggatctaacagaactcgccgtgaagactggcgaacagttcatacagagtcttttacgactcaatgacaagaagaaaatcttcgtcaacatggtggagcacgacactctggtctactccaaaaatgtcaaagatacagtctcagaagaccaaagggctattgagacttttcaacaaaggataatttcgggaaacctcctcggattccattgcccagctatctgtcacttcatcgaaaggacagtagaaaaggaaggtggctcctacaaatgccatcattgcgataaaggaaaggctatcattcaagatgcctctgccgacagtggtcccaaagatggacccccacccacgaggagcatcgtggaaaaagaagacgttccaaccacgtcttcaaagcaagtggattgatgtgacatctccactgacgtaagggatgacgcacaatcccactatccttcgcaagacccttcctctatataaggaagttcatttcatttggagaggacacgctcgagctcatttctctattacttcagccataacaaaagaactcttttctcttcttattaaaccatgaaaaagcctgaactcaccgcgacgtctgtcgagaagtttctgatcgaaaagttcgacagcgtctccgacctgatgcagctctcggagggcgaagaatctcgtgctttcagcttcgatgtaggagggcgtggatatgtcctgcgggtaaatagctgcgccgatggtttctacaaagatcgttatgtttatcggcactttgcatcggccgcgctcccgattccggaagtgcttgacattggggaattcagcgagagcctgacctattgcatctcccgccgtgcacagggtgtcacgttgcaagacctgcctgaaaccgaactgcccgctgttctgcagccggtcgcggaggccatggatgcgatcgctgcggccgatcttagccagacgagcgggttcggcccattcggaccgcaaggaatcggtcaatacactacatggcgtgatttcatatgcgcgattgctgatccccatgtgtatcactggcaaactgtgatggacgacaccgtcagtgcgtccgtcgcgcaggctctcgatgagctgatgctttgggccgaggactgccccgaagtccggcacctcgtgcacgcggatttcggctccaacaatgtcctgacggacaatggccgcataacagcggtcattgactggagcgaggcgatgttcggggattcccaatacgaggtcgccaacatcttcttctggaggccgtggttggcttgtatggagcagcagacgcgctacttcgagcggaggcatccggagcttgcaggatcgccgcggctccgggcgtatatgctccgcattggtcttgaccaactctatcagagcttggttgacggcaatttcgatgatgcagcttgggcgcagggtcgatgcgacgcaatcgtccgatccggagccgggactgtcgggcgtacacaaatcgcccgcagaagcgcggccgtctggaccgatggctgtgtagaagtactcgccgatagtggaaaccgacgccccagcactcgtccgagggcaaaggaatagtgaggtacctaaagaaggagtgcgtcgaagcagatcgttcaaacatttggcaataaagtttcttaagattgaatcctgttgccggtcttgcgatgattatcatataatttctgttgaattacgttaagcatgtaataattaacatgtaatgcatgacgttatttatgagatgggtttttatgattagagtcccgcaattatacatttaatacgcgatagaaaacaaaatatagcgcgcaaactaggataaattatcgcgcgcggtgtcatctatgttactagatcgatgtcgaatcgatcaacctgcattaatgaatcggccaacgcgcggggagaggcggtttgcgtattgggcgctcttccgcttcctcgctcactgactcgctgcgctcggtcgttcggctgcggcgagcggtatcagctcactcaaaggcggtaatacggttatccacagaatcaggggataacgcaggaaagaacatgtgagcaaaaggccagcaaaaggccaggaaccgtaaaaaggccgcgttgctggcgtttttccataggctccgcccccctgacgagcatcacaaaaatcgacgctcaagtcagaggtggcgaaacccgacaggactataaagataccaggcgtttccccctggaagctccctcgtgcgctctcctgttccgaccctgccgcttaccggatacctgtccgcctttctcccttcgggaagcgtggcgctttctcaatgctcacgctgtaggtatctcagttcggtgtaggtcgttcgctccaagctgggctgtgtgcacgaaccccccgttcagcccgaccgctgcgccttatccggtaactatcgtcttgagtccaacccggtaagacacgacttatcgccactggcagcagccactggtaacaggattagcagagcgaggtatgtaggcggtgctacagagttcttgaagtggtggcctaactacggctacactagaaggacagtatttggtatctgcgctctgctgaagccagttaccttcggaaaaagagttggtagctcttgatccggcaaacaaaccaccgctggtagcggtggtttttttgtttgcaagcagcagattacgcgcagaaaaaaaggatctcaagaagatcctttgatcttttctacggggtctgacgctcagtggaacgaaaactcacgttaagggattttggtcatgacattaacctataaaaataggcgtatcacgaggccctttcgtctcgcgcgtttcggtgatgacggtgaaaacctctgacacatgcagctcccggagacggtcacagcttgtctgtaagcggatgccgggagcagacaagcccgtcagggcgcgtcagcgggtgttggcgggtgtcggggctggcttaactatgcggcatcagagcagattgtactgagagtgcaccatatggacatattgtcgttagaacgcggctacaattaatacataaccttatgtatcatacacatacgatttaggtgacactatagaacggcgcgccaagcttgttgaaacatccctgaagtgtctcattttattttatttattctttgctgataaaaaaataaaataaaagaagctaagcacacggtcaaccattgctctactgctaaaagggttatgtgtagtgttttactgcataaattatgcagcaaacaagacaactcaaattaaaaaatttcctttgcttgtttttttgttgtctctgacttgactttcttgtggaagttggttgtataaggattgggacaccattgtccttcttaatttaattttattctttgctgataaaaaaaaaaatttcatatagtgttaaataataatttgttaaataaccaaaaagtcaaatatgtttactctcgtttaaataattgagattcgtccagcaaggctaaacgattgtatagatttatgacaatatttacttttttatagataaatgttatattataataaatttatatacatatattatatgttatttattattattttaaatccttcaatattttatcaaaccaactcataattttttttttatctgtaagaagcaataaaattaaatagacccactttaaggatgatccaacctttatacagagtaagagagttcaaatagtaccctttcatatacatatcaactaaaatattagaaatatcatggatcaaaccttataaagacattaaataagtggataagtataatatataaatgggtagtatataatatataaatggatacaaacttctctctttataattgttatgtctccttaacatcctaatataatacataagtgggtaatatataatatataaatggagacaaacttcttccattataattgttatgtcttcttaacacttatgtctcgttcacaatgctaaggttagaattgtttagaaagtcttatagtacacatttgtttttgtactatttgaagcattccataagccgtcacgattcagatgatttataataataagaggaaatttatcatagaacaataaggtgcatagatagagtgttaatatatcataacatcctttgtttattcatagaagaagtgagatggagctcagttattatactgttacatggtcggatacaatattccatgctctccatgagctcttacacctacatgcattttagttcatacttgcggccgcagtatatcttaaattctttaatacggtgtactaggatattgaactggttcttgatgatgaaaacctgggccgagattgcagctatttatagtcataggtcttgttaacatgcatggacatttggccacggggtggcatgcagtttgacgggtgttgaaataaacaaaaatgaggtggcggaagagaatacgagtttgaggttgggttagaaacaacaaatgtgagggctcatgatgggttgagttggtgaatgttttgggctgctcgattgacacctttgtgagtacgtgttgttgtgcatggcttttggggtccagtttttttttcttgacgcggcgatcctgatcagctagtggataagtgatgtccactgtgtgtgattgcgtttttgtttgaattttatgaacttagacattgctatgcaaaggatactctcattgtgttttgtcttcttttgttccttggctttttcttatgatccaagagactagtcagtgttgtggcattcgagactaccaagattaattatgatgggggaaggataagtaactgattagtacggactgttaccaaattaattaataagcggcaaatgaagggcatggatcaaaagcttggatctcctgcaggatctggccggccggatctc

SEQ ID NO: 27 - DNA, 7085 bp, Artificial Sequence
  Plasmid pKR85
cgcgccaagcttttgatccatgcccttcatttgccgcttattaattaatttggtaacagtccgtactaatcagttacttatccttcccccatcataattaatcttggtagtctcgaatgccacaacactgactagtctcttggatcataagaaaaagccaaggaacaaaagaagacaaaacacaatgagagtatcctttgcatagcaatgtctaagttcataaaattcaaacaaaaacgcaatcacacacagtggacatcacttatccactagctgatcaggatcgccgcgtcaagaaaaaaaaactggaccccaaaagccatgcacaacaacacgtactcacaaaggtgtcaatcgagcagcccaaaacattcaccaactcaacccatcatgagccctcacatttgttgtttctaacccaacctcaaactcgtattctcttccgccacctcatttttgtttatttcaacacccgtcaaactgcatgccaccccgtggccaaatgtccatgcatgttaacaagacctatgactataaatagctgcaatctcggcccaggttttcatcatcaagaaccagttcaatatcctagtacaccgtattaaagaatttaagatatactgcggccgcaagtatgaactaaaatgcatgtaggtgtaagagctcatggagagcatggaatattgtatccgaccatgtaacagtataataactgagctccatctcacttcttctatgaataaacaaaggatgttatgatatattaacactctatctatgcaccttattgttctatgataaatttcctcttattattataaatcatctgaatcgtgacggcttatggaatgcttcaaatagtacaaaaacaaatgtgtactataagactttctaaacaattctaaccttagcattgtgaacgagacataagtgttaagaagacataacaattataatggaagaagtttgtctccatttatatattatatattacccacttatgtattatattaggatgttaaggagacataacaattataaagagagaagtttgtatccatttatatattatatactacccatttatatattatacttatccacttatttaatgtctttataaggtttgatccatgatatttctaatattttagttgatatgtatatgaaagggtactatttgaactctcttactctgtataaaggttggatcatccttaaagtgggtctatttaattttattgcttcttacagataaaaaaaaaattatgagttggtttgataaaatattgaaggatttaaaataataataaataacatataatatatgtatataaatttattataatataacatttatctataaaaaagtaaatattgtcataaatctatacaatcgtttagccttgctggacgaatctcaattatttaaacgagagtaaacatatttgactttttggttatttaacaaattattatttaacactatatgaaatttttttttttatcagcaaagaataaaattaaattaagaaggacaatggtgtcccaatccttatacaaccaacttccacaagaaagtcaagtcagagacaacaaaaaaacaagcaaaggaaattttttaatttgagttgtcttgtttgctgcataatttatgcagtaaaacactacacataacccttttagcagtagagcaatggttgaccgtgtgcttagcttcttttattttatttttttatcagcaaagaataaataaaataaaatgagacacttcagggatgtttcaacaagcttggatctcctgcaggatctggccggccggatctcgtacggatccgtcgacggcgcgcccgatcatccggatatagttcctcctttcagcaaaaaacccctcaagacccgtttagaggccccaaggggttatgctagttattgctcagcggtggcagcagccaactcagcttcctttcgggctttgttagcagccggatcgatccaagctgtacctcactattcctttgccctcggacgagtgctggggcgtcggtttccactatcggcgagtacttctacacagccatcggtccagacggccgcgcttctgcgggcgatttgtgtacgcccgacagtcccggctccggatcggacgattgcgtcgcatcgaccctgcgcccaagctgcatcatcgaaattgccgtcaaccaagctctgatagagttggtcaagaccaatgcggagcatatacgcccggagccgcggcgatcctgcaagctccggatgcctccgctcgaagtagcgcgtctgctgctccatacaagccaaccacggcctccagaagaagatgttggcgacctcgtattgggaatccccgaacatcgcctcgctccagtcaatgaccgctgttatgcggccattgtccgtcaggacattgttggagccgaaatccgcgtgcacgaggtgccggacttcggggcagtcctcggcccaaagcatcagctcatcgagagcctgcgcgacggacgcactgacggtgtcgtccatcacagtttgccagtgatacacatggggatcagcaatcgcgcatatgaaatcacgccatgtagtgtattgaccgattccttgcggtccgaatgggccgaacccgctcgtctggctaagatcggccgcagcgatcgcatccatagcctccgcgaccggctgcagaacagcgggcagttcggtttcaggcaggtcttgcaacgtgacaccctgtgcacggcgggagatgcaataggtcaggctctcgctgaattccccaatgtcaagcacttccggaatcgggagcgcggccgatgcaaagtgccgataaacataacgatctttgtagaaaccatcggcgcagctatttacccgcaggacatatccacgccctcctacatcgaagctgaaagcacgagattcttcgccctccgagagctgcatcaggtcggagacgctgtcgaacttttcgatcagaaacttctcgacagacgtcgcggtgagttcaggcttttccatgggtatatctccttcttaaagttaaacaaaattatttctagagggaaaccgttgtggtctccctatagtgagtcgtattaatttcgcgggatcgagatcgatccaattccaatcccacaaaaatctgagcttaacagcacagttgctcctctcagagcagaatcgggtattcaacaccctcatatcaactactacgttgtgtataacggtccacatgccggtatatacgatgactggggttgtacaaaggcggcaacaaacggcgttcccggagttgcacacaagaaatttgccactattacagaggcaagagcagcagctgacgcgtacacaacaagtcagcaaacagacaggttgaacttcatccccaaaggagaagctcaactcaagcccaagagctttgctaaggccctaacaagcccaccaaagcaaaaagcccactggctcacgctaggaaccaaaaggcccagcagtgatccagccccaaaagagatctcctttgccccggagattacaatggacgatttcctctatctttacgatctaggaaggaagttcgaaggtgaaggtgacgacactatgttcaccactgataatgagaaggttagcctcttcaatttcagaaagaatgctgacccacagatggttagagaggcctacgcagcaggtctcatcaagacgatctacccgagtaacaatctccaggagatcaaataccttcccaagaaggttaaagatgcagtcaaaagattcaggactaattgcatcaagaacacagagaaagacatatttctcaagatcagaagtactattccagtatggacgattcaaggcttgcttcataaaccaaggcaagtaatagagattggagtctctaaaaaggtagttcctactgaatctaaggccatgcatggagtctaagattcaaatcgaggatctaacagaactcgccgtgaagactggcgaacagttcatacagagtcttttacgactcaatgacaagaagaaaatcttcgtcaacatggtggagcacgacactctggtctactccaaaaatgtcaaagatacagtctcagaagaccaaagggctattgagacttttcaacaaaggataatttcgggaaacctcctcggattccattgcccagctatctgtcacttcatcgaaaggacagtagaaaaggaaggtggctcctacaaatgccatcattgcgataaaggaaaggctatcattcaagatgcctctgccgacagtggtcccaaagatggacccccacccacgaggagcatcgtggaaaaagaagacgttccaaccacgtcttcaaagcaagtggattgatgtgacatctccactgacgtaagggatgacgcacaatcccactatccttcgcaagacccttcctctatataaggaagttcatttcatttggagaggacacgctcgagctcatttctctattacttcagccataacaaaagaactcttttctcttcttattaaaccatgaaaaagcctgaactcaccgcgacgtctgtcgagaagtttctgatcgaaaagttcgacagcgtctccgacctgatgcagctctcggagggcgaagaatctcgtgctttcagcttcgatgtaggagggcgtggatatgtcctgcgggtaaatagctgcgccgatggtttctacaaagatcgttatgtttatcggcactttgcatcggccgcgctcccgattccggaagtgcttgacattggggaattcagcgagagcctgacctattgcatctcccgccgtgcacagggtgtcacgttgcaagacctgcctgaaaccgaactgcccgctgttctgcagccggtcgcggaggccatggatgcgatcgctgcggccgatcttagccagacgagcgggttcggcccattcggaccgcaaggaatcggtcaatacactacatggcgtgatttcatatgcgcgattgctgatccccatgtgtatcactggcaaactgtgatggacgacaccgtcagtgcgtccgtcgcgcaggctctcgatgagctgatgctttgggccgaggactgccccgaagtccggcacctcgtgcacgcggatttcggctccaacaatgtcctgacggacaatggccgcataacagcggtcattgactggagcgaggcgatgttcggggattcccaatacgaggtcgccaacatcttcttctggaggccgtggttggcttgtatggagcagcagacgcgctacttcgagcggaggcatccggagcttgcaggatcgccgcggctccgggcgtatatgctccgcattggtcttgaccaactctatcagagcttggttgacggcaatttcgatgatgcagcttgggcgcagggtcgatgcgacgcaatcgtccgatccggagccgggactgtcgggcgtacacaaatcgcccgcagaagcgcggccgtctggaccgatggctgtgtagaagtactcgccgatagtggaaaccgacgccccagcactcgtccgagggcaaaggaatagtgaggtacctaaagaaggagtgcgtcgaagcagatcgttcaaacatttggcaataaagtttcttaagattgaatcctgttgccggtcttgcgatgattatcatataatttctgttgaattacgttaagcatgtaataattaacatgtaatgcatgacgttatttatgagatgggtttttatgattagagtcccgcaattatacatttaatacgcgatagaaaacaaaatatagcgcgcaaactaggataaattatcgcgcgcggtgtcatctatgttactagatcgatgtcgaatcgatcaacctgcattaatgaatcggccaacgcgcggggagaggcggtttgcgtattgggcgctcttccgcttcctcgctcactgactcgctgcgctcggtcgttcggctgcggcgagcggtatcagctcactcaaaggcggtaatacggttatccacagaatcaggggataacgcaggaaagaacatgtgagcaaaaggccagcaaaaggccaggaaccgtaaaaaggccgcgttgctggcgtttttccataggctccgcccccctgacgagcatcacaaaaatcgacgctcaagtcagaggtggcgaaacccgacaggactataaagataccaggcgtttccccctggaagctccctcgtgcgctctcctgttccgaccctgccgcttaccggatacctgtccgcctttctcccttcgggaagcgtggcgctttctcaatgctcacgctgtaggtatctcagttcggtgtaggtcgttcgctccaagctgggctgtgtgcacgaaccccccgttcagcccgaccgctgcgccttatccggtaactatcgtcttgagtccaacccggtaagacacgacttatcgccactggcagcagccactggtaacaggattagcagagcgaggtatgtaggcggtgctacagagttcttgaagtggtggcctaactacggctacactagaaggacagtatttggtatctgcgctctgctgaagccagttaccttcggaaaaagagttggtagctcttgatccggcaaacaaaccaccgctggtagcggtggtttttttgtttgcaagcagcagattacgcgcagaaaaaaaggatctcaagaagatcctttgatcttttctacggggtctgacgctcagtggaacgaaaactcacgttaagggattttggtcatgacattaacctataaaaataggcgtatcacgaggccctttcgtctcgcgcgtttcggtgatgacggtgaaaacctctgacacatgcagctcccggagacggtcacagcttgtctgtaagcggatgccgggagcagacaagcccgtcagggcgcgtcagcgggtgttggcgggtgtcggggctggcttaactatgcggcatcagagcagattgtactgagagtgcaccatatggacatattgtcgttagaacgcggctacaattaatacataaccttatgtatcatacacatacgatttaggtgacactatagaacgg

SEQ ID NO: 28 - DNA, 22 bp, Artificial Sequence
  Primer oKR85-1
actcgaggcgcgccgtcgacgg

SEQ ID NO: 29 - DNA, 18 bp, Artificial Sequence
  Primer oKR85-2
aagatctggcgcgccaag

SEQ ID NO: 30 - DNA, 4827 bp, Artificial Sequence
  Plasmid pPCR85
actcgaggcgcgccgtcgacggatccgtacgagatccggccggccagatcctgcaggagatccaagcttgttgaaacatccctgaagtgtctcattttattttatttattctttgctgataaaaaaataaaataaaagaagctaagcacacggtcaaccattgctctactgctaaaagggttatgtgtagtgttttactgcataaattatgcagcaaacaagacaactcaaattaaaaaatttcctttgcttgtttttttgttgtctctgacttgactttcttgtggaagttggttgtataaggattgggacaccattgtccttcttaatttaattttattctttgctgataaaaaaaaaaatttcatatagtgttaaataataatttgttaaataaccaaaaagtcaaatatgtttactctcgtttaaataattgagattcgtccagcaaggctaaacgattgtatagatttatgacaatatttacttttttatagataaatgttatattataataaatttatatacatatattatatgttatttattattattttaaatccttcaatattttatcaaaccaactcataattttttttttatctgtaagaagcaataaaattaaatagacccactttaaggatgatccaacctttatacagagtaagagagttcaaatagtaccctttcatatacatatcaactaaaatattagaaatatcatggatcaaaccttataaagacattaaataagtggataagtataatatataaatgggtagtatataatatataaatggatacaaacttctctctttataattgttatgtctccttaacatcctaatataatacataagtgggtaatatataatatataaatggagacaaacttcttccattataattgttatgtcttcttaacacttatgtctcgttcacaatgctaaggttagaattgtttagaaagtcttatagtacacatttgtttttgtactatttgaagcattccataagccgtcacgattcagatgatttataataataagaggaaatttatcatagaacaataaggtgcatagatagagtgttaatatatcataacatcctttgtttattcatagaagaagtgagatggagctcagttattatactgttacatggtcggatacaatattccatgctctccatgagctcttacacctacatgcattttagttcatacttgcggccgcagtatatcttaaattctttaatacggtgtactaggatattgaactggttcttgatgatgaaaacctgggccgagattgcagctatttatagtcataggtcttgttaacatgcatggacatttggccacggggtggcatgcagtttgacgggtgttgaaataaacaaaaatgaggtggcggaagagaatacgagtttgaggttgggttagaaacaacaaatgtgagggctcatgatgggttgagttggtgaatgttttgggctgctcgattgacacctttgtgagtacgtgttgttgtgcatggcttttggggtccagtttttttttcttgacgcggcgatcctgatcagctagtggataagtgatgtccactgtgtgtgattgcgtttttgtttgaattttatgaacttagacattgctatgcaaaggatactctcattgtgttttgtcttcttttgttccttggctttttcttatgatccaagagactagtcagtgttgtggcattcgagactaccaagattaattatgatgggggaaggataagtaactgattagtacggactgttaccaaattaattaataagcggcaaatgaagggcatggatcaaaagcttggcgcgccagatcttgggctagagcggccgccaccgcggtggagctccagcttttgttccctttagtgagggttaattgcgcgcttggcgtaatcatggtcatagctgtttcctgtgtgaaattgttatccgctcacaattccacacaacatacgagccggaagcataaagtgtaaagcctggggtgcctaatgagtgagctaactcacattaattgcgttgcgctcactgcccgctttccagtcgggaaacctgtcgtgccagctgcattaatgaatcggccaacgcgcggggagaggcggtttgcgtattgggcgctcttccgcttcctcgctcactgactcgctgcgctcggtcgttcggctgcggcgagcggtatcagctcactcaaaggcggtaatacggttatccacagaatcaggggataacgcaggaaagaacatgtgagcaaaaggccagcaaaaggccaggaaccgtaaaaaggccgcgttgctggcgtttttccataggctccgcccccctgacgagcatcacaaaaatcgacgctcaagtcagaggtggcgaaacccgacaggactataaagataccaggcgtttccccctggaagctccctcgtgcgctctcctgttccgaccctgccgcttaccggatacctgtccgcctttctcccttcgggaagcgtggcgctttctcatagctcacgctgtaggtatctcagttcggtgtaggtcgttcgctccaagctgggctgtgtgcacgaaccccccgttcagcccgaccgctgcgccttatccggtaactatcgtcttgagtccaacccggtaagacacgacttatcgccactggcagcagccactggtaacaggattagcagagcgaggtatgtaggcggtgctacagagttcttgaagtggtggcctaactacggctacactagaaggacagtatttggtatctgcgctctgctgaagccagttaccttcggaaaaagagttggtagctcttgatccggcaaacaaaccaccgctggtagcggtggtttttttgtttgcaagcagcagattacgcgcagaaaaaaaggatctcaagaagatcctttgatcttttctacggggtctgacgctcagtggaacgaaaactcacgttaagggattttggtcatgagattatcaaaaaggatcttcacctagatccttttaaattaaaaatgaagttttaaatcaatctaaagtatatatgagtaaacttggtctgacagttaccaatgcttaatcagtgaggcacctatctcagcgatctgtctatttcgttcatccatagttgcctgactccccgtcgtgtagataactacgatacgggagggcttaccatctggccccagtgctgcaatgataccgcgagacccacgctcaccggctccagatttatcagcaataaaccagccagccggaagggccgagcgcagaagtggtcctgcaactttatccgcctccatccagtctattaattgttgccgggaagctagagtaagtagttcgccagttaatagtttgcgcaacgttgttgccattgctacaggcatcgtggtgtcacgctcgtcgtttggtatggcttcattcagctccggttcccaacgatcaaggcgagttacatgatcccccatgttgtgcaaaaaagcggttagctccttcggtcctccgatcgttgtcagaagtaagttggccgcagtgttatcactcatggttatggcagcactgcataattctcttactgtcatgccatccgtaagatgcttttctgtgactggtgagtactcaaccaagtcattctgagaatagtgtatgcggcgaccgagttgctcttgcccggcgtcaatacgggataataccgcgccacatagcagaactttaaaagtgctcatcattggaaaacgttcttcggggcgaaaactctcaaggatcttaccgctgttgagatccagttcgatgtaacccactcgtgcacccaactgatcttcagcatcttttactttcaccagcgtttctgggtgagcaaaaacaggaaggcaaaatgccgcaaaaaagggaataagggcgacacggaaatgttgaatactcatactcttcctttttcaatattattgaagcatttatcagggttattgtctcatgagcggatacatatttgaatgtatttagaaaaataaacaaataggggttccgcgcacatttccccgaaaagtgccacctaaattgtaagcgttaatattttgttaaaattcgcgttaaatttttgttaaatcagctcattttttaaccaataggccgaaatcggcaaaatcccttataaatcaaaagaatagaccgagatagggttgagtgttgttccagtttggaacaagagtccactattaaagaacgtggactccaacgtcaaagggcgaaaaaccgtctatcagggcgatggcccactacgtgaaccatcaccctaatcaagttttttggggtcgaggtgccgtaaagcactaaatcggaaccctaaagggagcccccgatttagagcttgacggggaaagccggcgaacgtggcgagaaaggaagggaagaaagcgaaaggagcgggcgctagggcgctggcaagtgtagcggtcacgctgcgcgtaaccaccacacccgccgcgcttaatgcgccgctacagggcgcgtcccattcgccattcaggctgcgcaactgttgggaagggcgatcggtgcgggcctcttcgctattacgccagctggcgaaagggggatgtgctgcaaggcgattaagttgggtaacgccagggttttcccagtcacgacgttgtaaaacgacggccagtgagcgcgcgtaatacgactcactatagggcgaattgggtaccgggccccccctcgaggtcgacggtatcgataagcttgatatcgaattcctgcagcccgggggatccgccc

SEQ ID NO: 31 - DNA, 15114 bp, Artificial Sequence
  Plasmid pKR91
gatctggcgcgccaagcttttgatccatgcccttcatttgccgcttattaattaatttggtaacagtccgtactaatcagttacttatccttcccccatcataattaatcttggtagtctcgaatgccacaacactgactagtctcttggatcataagaaaaagccaaggaacaaaagaagacaaaacacaatgagagtatcctttgcatagcaatgtctaagttcataaaattcaaacaaaaacgcaatcacacacagtggacatcacttatccactagctgatcaggatcgccgcgtcaagaaaaaaaaactggaccccaaaagccatgcacaacaacacgtactcacaaaggtgtcaatcgagcagcccaaaacattcaccaactcaacccatcatgagccctcacatttgttgtttctaacccaacctcaaactcgtattctcttccgccacctcatttttgtttatttcaacacccgtcaaactgcatgccaccccgtggccaaatgtccatgcatgttaacaagacctatgactataaatagctgcaatctcggcccaggttttcatcatcaagaaccagttcaatatcctagtacaccgtattaaagaatttaagatatactgcggccgcaagtatgaactaaaatgcatgtaggtgtaagagctcatggagagcatggaatattgtatccgaccatgtaacagtataataactgagctccatctcacttcttctatgaataaacaaaggatgttatgatatattaacactctatctatgcaccttattgttctatgataaatttcctcttattattataaatcatctgaatcgtgacggcttatggaatgcttcaaatagtacaaaaacaaatgtgtactataagactttctaaacaattctaaccttagcattgtgaacgagacataagtgttaagaagacataacaattataatggaagaagtttgtctccatttatatattatatattacccacttatgtattatattaggatgttaaggagacataacaattataaagagagaagtttgtatccatttatatattatatactacccatttatatattatacttatccacttatttaatgtctttataaggtttgatccatgatatttctaatattttagttgatatgtatatgaaagggtactatttgaactctcttactctgtataaaggttggatcatccttaaagtgggtctatttaattttattgcttcttacagataaaaaaaaaattatgagttggtttgataaaatattgaaggatttaaaataataataaataacatataatatatgtatataaatttattataatataacatttatctataaaaaagtaaatattgtcataaatctatacaatcgtttagccttgctggacgaatctcaattatttaaacgagagtaaacatatttgactttttggttatttaacaaattattatttaacactatatgaaatttttttttttatcagcaaagaataaaattaaattaagaaggacaatggtgtcccaatccttatacaaccaacttccacaagaaagtcaagtcagagacaacaaaaaaacaagcaaaggaaattttttaatttgagttgtcttgtttgctgcataatttatgcagtaaaacactacacataacccttttagcagtagagcaatggttgaccgtgtgcttagcttcttttattttatttttttatcagcaaagaataaataaaataaaatgagacacttcagggatgtttcaacaagcttggatctcctgcaggatctggccggccggatctcgtacggatccgtcgacggcgcgcctcgagtgggcggatcccccgggctgcaggaattcactggccgtcgttttacaacgtcgtgactgggaaaaccctggcgttacccaacttaatcgccttgcagcacatccccctttcgccagctggcgtaatagcgaagaggcccgcaccgatcgcccttcccaacagttgcgcagcctgaatggcgaatggatcgatccatcgcgatgtaccttttgttagtcagcctctcgattgctcatcgtcattacacagtaccgaagtttgatcgatctagtaacatagatgacaccgcgcgcgataatttatcctagtttgcgcgctatattttgttttctatcgcgtattaaatgtataattgcgggactctaatcataaaaacccatctcataaataacgtcatgcattacatgttaattattacatgcttaacgtaattcaacagaaattatatgataatcatcgcaagaccggcaacaggattcaatcttaagaaactttattgccaaatgtttgaacgatctgcttcgacgcactccttctttactccaccatctcgtccttattgaaaacgtgggtagcaccaaaacgaatcaagtcgctggaactgaagttaccaatcacgctggatgatttgccagttggattaatcttgcctttccccgcatgaataatattgatgaatgcatgcgtgaggggtagttcgatgttggcaatagctgcaattgccgcgacatcctccaacgagcataattcttcagaaaaatagcgatgttccatgttgtcagggcatgcatgatgcacgttatgaggtgacggtgctaggcagtattccctcaaagtttcatagtcagtatcatattcatcattgcattcctgcaagagagaattgagacgcaatccacacgctgcggcaaccttccggcgttcgtggtctatttgctcttggacgttgcaaacgtaagtgttggatcgatccggggtgggcgaagaactccagcatgagatccccgcgctggaggatcatccagccggcgtcccggaaaacgattccgaagcccaacctttcatagaaggcggcggtggaatcgaaatctcgtgatggcaggttgggcgtcgcttggtcggtcatttcgaaccccagagtcccgctcagaagaactcgtcaagaaggcgatagaaggcgatgcgctgcgaatcgggagcggcgataccgtaaagcacgaggaagcggtcagcccattcgccgccaagctcttcagcaatatcacgggtagccaacgctatgtcctgatagcggtccgccacacccagccggccacagtcgatgaatccagaaaagcggccattttccaccatgatattcggcaagcaggcatcgccatgggtcacgacgagatcctcgccgtcgggcatgcgcgccttgagcctggcgaacagttcggctggcgcgagcccctgatgctcttcgtccagatcatcctgatcgacaagaccggcttccatccgagtacgtgctcgctcgatgcgatgtttcgcttggtggtcgaatgggcaggtagccggatcaagcgtatgcagccgccgcattgcatcagccatgatggatactttctcggcaggagcaaggtgagatgacaggagatcctgccccggcacttcgcccaatagcagccagtcccttcccgcttcagtgacaacgtcgagcacagctgcgcaaggaacgcccgtcgtggccagccacgatagccgcgctgcctcgtcctgcagttcattcagggcaccggacaggtcggtcttgacaaaaagaaccgggcgcccctgcgctgacagccggaacacggcggcatcagagcagccgattgtctgttgtgcccagtcatagccgaatagcctctccacccaagcggccggagaacctgcgtgcaatccatcttgttcaatcatgcgaaacgatccccgcaagcttggagactggtgatttcagcgtgtcctctccaaatgaaatgaacttccttatatagaggaagggtcttgcgaaggatagtgggattgtgcgtcatcccttacgtcagtggagatatcacatcaatccacttgctttgaagacgtggttggaacgtcttctttttccacgatgctcctcgtgggtgggggtccatctttgggaccactgtcggcagaggcatcttcaacgatggcctttcctttatcgcaatgatggcatttgtaggagccaccttccttttccactatcttcacaataaagtgacagatagctgggcaatggaatccgaggaggtttccggatattaccctttgttgaaaagtctcaattgccctttggtcttctgagactgtatctttgatatttttggagtagacaagcgtgtcgtgctccaccatgttgacgaagattttcttcttgtcattgagtcgtaagagactctgtatgaactgttcgccagtctttacggcgagttctgttaggtcctctatttgaatctttgactccatggcctttgattcagtgggaactacctttttagagactccaatctctattacttgccttggtttgtgaagcaagccttgaatcgtccatactggaatagtacttctgatcttgagaaatatatctttctctgtgttcttgatgcagttagtcctgaatcttttgactgcatctttaaccttcttgggaaggtatttgatctcctggagattattgctcgggtagatcgtcttgatgagacctgctgcgtaagcctctctaaccatctgtgggttagcattctttctgaaattgaaaaggctaatcttctcattatcagtggtgaacatggtatcgtcaccttctccgtcgaacttcctgactagatcgtagagatagaggaagtcgtccattgtgatctctggggcaaaggagatctgaattaattcgatatggtggatttatcacaaatgggacccgccgccgacagaggtgtgatgttaggccaggactttgaaaatttgcgcaactatcgtatagtggccgacaaattgacgccgagttgacagactgcctagcatttgagtgaattatgtgaggtaatgggctacactgaattggtagctcaaactgtcagtatttatgtatatgagtgtatattttcgcataatctcagaccaatctgaagatgaaatgggtatctgggaatggcgaaatcaaggcatcgatcgtgaagtttctcatctaagcccccatttggacgtgaatgtagacacgtcgaaataaagatttccgaattagaataatttgtttattgctttcgcctataaatacgacggatcgtaatttgtcgttttatcaaaatgtactttcattttataataacgctgcggacatctacatttttgaattgaaaaaaaattggtaattactctttctttttctccatattgaccatcatactcattgctgatccatgtagatttcccggacatgaagccatttacaattgaatatatcctgccgccgctgccgctttgcacccggtggagcttgcatgttggtttctacgcagaactgagccggttaggcagataatttccattgagaactgagccatgtgcaccttccccccaacacggtgagcgacggggcaacggagtgatccacatgggacttttaaacatcatccgtcggatggcgttgcgagagaagcagtcgatccgtgagatcagccgacgcaccgggcaggcgcgcaacacgatcgcaaagtatttgaacgcaggtacaatcgagccgacgttcacgcggaacgaccaagcaagctagctttaatgcggtagtttatcacagttaaattgctaacgcagtcaggcaccgtgtatgaaatctaacaatgcgctcatcgtcatcctcggcaccgtcaccctggatgctgtaggcataggcttggttatgccggtactgccgggcctcttgcgggatatcgtccattccgacagcatcgccagtcactatggcgtgctgctagcgctatatgcgttgatgcaatttctatgcgcacccgttctcggagcactgtccgaccgctttggccgccgcccagtcctgctcgcttcgctacttggagccactatcgactacgcgatcatggcgaccacacccgtcctgtggtccaacccctccgctgctatagtgcagtcggcttctgacgttcagtgcagccgtcttctgaaaacgacatgtcgcacaagtcctaagttacgcgacaggctgccgccctgcccttttcctggcgttttcttgtcgcgtgttttagtcgcataaagtagaatacttgcgactagaaccggagacattacgccatgaacaagagcgccgccgctggcctgctgggctatgcccgcgtcagcaccgacgaccaggacttgaccaaccaacgggccgaactgcacgcggccggctgcaccaagctgttttccgagaagatcaccggcaccaggcgcgaccgcccggagctggccaggatgcttgaccacctacgccctggcgacgttgtgacagtgaccaggctagaccgcctggcccgcagcacccgcgacctactggacattgccgagcgcatccaggaggccggcgcgggcctgcgtagcctggcagagccgtgggccgacaccaccacgccggccggccgcatggtgttgaccgtgttcgccggcattgccgagttcgagcgttccctaatcatcgaccgcacccggagcgggcgcgaggccgccaaggcccgaggcgtgaagtttggcccccgccctaccctcaccccggcacagatcgcgcacgcccgcgagctgatcgaccaggaaggccgcaccgtgaaagaggcggctgcactgcttggcgtgcatcgctcgaccctgtaccgcgcacttgagcgcagcgaggaagtgacgcccaccgaggccaggcggcgcggtgccttccgtgaggacgcattgaccgaggccgacgccctggcggccgccgagaatgaacgccaagaggaacaagcatgaaaccgcaccaggacggccaggacgaaccgtttttcattaccgaagagatcgaggcggagatgatcgcggccgggtacgtgttcgagccgcccgcgcacgtctcaaccgtgcggctgcatgaaatcctggccggtttgtctgatgccaagctggcggcctggccggccagcttggccgctgaagaaaccgagcgccgccgtctaaaaaggtgatgtgtatttgagtaaaacagcttgcgtcatgcggtcgctgcgtatatgatgcgatgagtaaataaacaaatacgcaagggaacgcatgaagttatcgctgtacttaaccagaaaggcgggtcaggcaagacgaccatcgcaacccatctagcccgcgccctgcaactcgccggggccgatgttctgttagtcgattccgatccccagggcagtgcccgcgattgggcggccgtgcgggaagatcaaccgctaaccgttgtcggcatcgaccgcccgacgattgaccgcgacgtgaaggccatcggccggcgcgacttcgtagtgatcgacggagcgccccaggcggcggacttggctgtgtccgcgatcaaggcagccgacttcgtgctgattccggtgcagccaagcccttacgacatatgggccaccgccgacctggtggagctggttaagcagcgcattgaggtcacggatggaaggctacaagcggcctttgtcgtgtcgcgggcgatcaaaggcacgcgcatcggcggtgaggttgccgaggcgctggccgggtacgagctgcccattcttgagtcccgtatcacgcagcgcgtgagctacccaggcactgccgccgccggcacaaccgttcttgaatcagaacccgagggcgacgctgcccgcgaggtccaggcgctggccgctgaaattaaatcaaaactcatttgagttaatgaggtaaagagaaaatgagcaaaagcacaaacacgctaagtgccggccgtccgagcgcacgcagcagcaaggctgcaacgttggccagcctggcagacacgccagccatgaagcgggtcaactttcagttgccggcggaggatcacaccaagctgaagatgtacgcggtacgccaaggcaagaccattaccgagctgctatctgaatacatcgcgcagctaccagagtaaatgagcaaatgaataaatgagtagatgaattttagcggctaaaggaggcggcatggaaaatcaagaacaaccaggcaccgacgccgtggaatgccccatgtgtggaggaacgggcggttggccaggcgtaagcggctgggttgtctgccggccctgcaatggcactggaacccccaagcccgaggaatcggcgtgagcggtcgcaaaccatccggcccggtacaaatcggcgcggcgctgggtgatgacctggtggagaagttgaaggccgcgcaggccgcccagcggcaacgcatcgaggcagaagcacgccccggtgaatcgtggcaagcggccgctgatcgaatccgcaaagaatcccggcaaccgccggcagccggtgcgccgtcgattaggaagccgcccaagggcgacgagcaaccagattttttcgttccgatgctctatgacgtgggcacccgcgatagtcgcagcatcatggacgtggccgttttccgtctgtcgaagcgtgaccgacgagctggcgaggtgatccgctacgagcttccagacgggcacgtagaggtttccgcagggccggccggcatggccagtgtgtgggattacgacctggtactgatggcggtttcccatctaaccgaatccatgaaccgataccgggaagggaagggagacaagcccggccgcgtgttccgtccacacgttgcggacgtactcaagttctgccggcgagccgatggcggaaagcagaaagacgacctggtagaaacctgcattcggttaaacaccacgcacgttgccatgcagcgtacgaagaaggccaagaacggccgcctggtgacggtatccgagggtgaagccttgattagccgctacaagatcgtaaagagcgaaaccgggcggccggagtacatcgagatcgagctagctgattggatgtaccgcgagatcacagaaggcaagaacccggacgtgctgacggttcaccccgattactttttgatcgatcccggcatcggccgttttctctaccgcctggcacgccgcgccgcaggcaaggcagaagccagatggttgttcaagacgatctacgaacgcagtggcagcgccggagagttcaagaagttctgtttcaccgtgcgcaagctgatcgggtcaaatgacctgccggagtacgatttgaaggaggaggcggggcaggctggcccgatcctagtcatgcgctaccgcaacctgatcgagggcgaagcatccgccggttcctaatgtacggagcagatgctagggcaaattgccctagcaggggaaaaaggtcgaaaaggtctctttcctgtggatagcacgtacattgggaacccaaagccgtacattgggaaccggaacccgtacattgggaacccaaagccgtacattgggaaccggtcacacatgtaagtgactgatataaaagagaaaaaaggcgatttttccgcctaaaactctttaaaacttattaaaactcttaaaacccgcctggcctgtgcataactgtctggccagcgcacagccgaagagctgcaaaaagcgcctacccttcggtcgctgcgctccctacgccccgccgcttcgcgtcggcctatcgcggccgctggccgctcaaaaatggctggcctacggccaggcaatctaccagggcgcggacaagccgcgccgtcgccactcgaccgccggcgcccacatcaaggcaccctgcctcgcgcgtttcggtgatgacggtgaaaacctctgacacatgcagctcccggagacggtcacagcttgtctgtaagcggatgccgggagcagacaagcccgtcagggcgcgtcagcgggtgttggcgggtgtcggggcgcagccatgacccagtcacgtagcgatagcggagtgtatactggcttaactatgcggcatcagagcagattgtactgagagtgcaccatatgcggtgtgaaataccgcacagatgcgtaaggagaaaataccgcatcaggcgctcttccgcttcctcgctcactgactcgctgcgctcggtcgttcggctgcggcgagcggtatcagctcactcaaaggcggtaatacggttatccacagaatcaggggataacgcaggaaagaacatgtgagcaaaaggccagcaaaaggccaggaaccgtaaaaaggccgcgttgctggcgtttttccataggctccgcccccctgacgagcatcacaaaaatcgacgctcaagtcagaggtggcgaaacccgacaggactataaagataccaggcgtttccccctggaagctccctcgtgcgctctcctgttccgaccctgccgcttaccggatacctgtccgcctttctcccttcgggaagcgtggcgctttctcatagctcacgctgtaggtatctcagttcggtgtaggtcgttcgctccaagctgggctgtgtgcacgaaccccccgttcagcccgaccgctgcgccttatccggtaactatcgtcttgagtccaacccggtaagacacgacttatcgccactggcagcagccactggtaacaggattagcagagcgaggtatgtaggcggtgctacagagttcttgaagtggtggcctaactacggctacactagaaggacagtatttggtatctgcgctctgctgaagccagttaccttcggaaaaagagttggtagctcttgatccggcaaacaaaccaccgctggtagcggtggtttttttgtttgcaagcagcagattacgcgcagaaaaaaaggatctcaagaagatcctttgatcttttctacggggtctgacgctcagtggaacgaaaactcacgttaagggattttggtcatgagattatcaaaaaggatcttcacctagatccttttaaattaaaaatgaagttttaaatcaatctaaagtatatatgagtaaacttggtctgacagttaccaatgcttaatcagtgaggcacctatctcagcgatctgtctatttcgttcatccatagttgcctgactccccgtcgtgtagataactacgatacgggagggcttaccatctggccccagtgctgcaatgataccgcgagacccacgctcaccggctccagatttatcagcaataaaccagccagccggaagggccgagcgcagaagtggtcctgcaactttatccgcctccatccagtctattaattgttgccgggaagctagagtaagtagttcgccagttaatagtttgcgcaacgttgttgccattgctacaggcatcgtggtgtcacgctcgtcgtttggtatggcttcattcagctccggttcccaacgatcaaggcgagttacatgatcccccatgttgtgcaaaaaagcggttagctccttcggtcctccgatcgttgtcagaagtaagttggccgcagtgttatcactcatggttatggcagcactgcataattctcttactgtcatgccatccgtaagatgcttttctgtgactggtgagtactcaaccaagtcattctgagaatagtgtatgcggcgaccgagttgctcttgcccggcgtcaacacgggataataccgcgccacatagcagaactttaaaagtgctcatcattggaaaagacctgcaggggggggggggcgctgaggtctgcctcgtgaagaaggtgttgctgactcataccaggcctgaatcgccccatcatccagccagaaagtgagggagccacggttgatgagagctttgttgtaggtggaccagttggtgattttgaacttttgctttgccacggaacggtctgcgttgtcgggaagatgcgtgatctgatccttcaactcagcaaaagttcgatttattcaacaaagccgccgtcccgtcaagtcagcgtaatgctctgccagtgttacaaccaattaaccaattctgattagaaaaactcatcgagcatcaaatgaaactgcaatttattcatatcaggattatcaataccatatttttgaaaaagccgtttctgtaatgaaggagaaaactcaccgaggcagttccataggatggcaagatcctggtatcggtctgcgattccgactcgtccaacatcaatacaacctattaatttcccctcgtcaaaaataaggttatcaagtgagaaatcaccatgagtgacgactgaatccggtgagaatggcaaaagcttatgcatttctttccagacttgttcaacaggccagccattacgctcgtcatcaaaatcactcgcatcaaccaaaccgttattcattcgtgattgcgcctgagcgagacgaaatacgcgatcgctgttaaaaggacaattacaaacaggaatcgaatgcaaccggcgcaggaacactgccagcgcatcaacaatattttcacctgaatcaggatattcttctaatacctggaatgctgttttcccggggatcgcagtggtgagtaaccatgcatcatcaggagtacggataaaatgcttgatggtcggaagaggcataaattccgtcagccagtttagtctgaccatctcatctgtaacatcattggcaacgctacctttgccatgtttcagaaacaactctggcgcatcgggcttcccatacaatcgatagattgtcgcacctgattgcccgacattatcgcgagcccatttatacccatataaatcagcatccatgttggaatttaatcgcggcctcgagcaagacgtttcccgttgaatatggctcataacaccccttgtattactgtttatgtaagcagacagttttattgttcatgatgatatatttttatcttgtgcaatgtaacatcagagattttgagacacaacgtggctttcccccccccccctgcaggtcaattcggtcgatatggctattacgaagaaggctcgtgcgcggagtcccgtgaactttcccacgcaacaagtgaaccgcaccgggtttgccggaggccatttcgttaaaatgcgcagccatggctgcttcgtccagcatggcgtaatactgatcctcgtcttcggctggcggtatattgccgatgggcttcaaaagccgccgtggttgaaccagtctatccattccaaggtagcgaactcgaccgcttcgaagctcctccatggtccacgccgatgaatgacctcggccttgtaaagaccgttgatcgcttctgcgagggcgttgtcgtgctgtcgccgacgcttccgatagatggctcgatacctgcttctgccaaccgctcggaatagcgaaaggacacgtattgaacaccgcgatccgagtgatgcactaggccgccatgagcgggacgccgatcatgatgagcctcctcgagggcatcgaggacaaagcctgcatgtgctgtccggctcgcccgccatccgacaatgcgacgggcgaagacgtcgatcacgaaggccacgtagacgaagccctcccaagtggcgacataagtacggacatgcgcaaaggctttcccggtttgtcgctgatggtgcaagagacgctgaagcgcgatccgatgcgcaggcatctgttcgtcttccgcggtcgtggcggtggcctgatcaaggtcactcgccgaagagctgcatgattggctcgaaaccgagcgggggaaattgtcgcgcagttctcccgtcgccgaggcgataaattacatgctcaagcgatgggatggcattacgtcattcctcgatgacggcccgatttgcctgacgaacaatgctgccgaacgaacgctcagaggctatgtactcggcaggaagtcatggctgtttgccggatcggatcgttgtgctgaacgtgcggcgttcatggcgacactgatcatgagcgccaagctcaataacatcgatccgcaggcctggcttgccgacgtccgcgccgaccttgcggacgctccgatcagcaggcttgagcaacagctgccgtggaactggacatccaagacactgagtgctcaggcggcctgacctgcggccttcaccggatacttaccccattatcgcagattgcgatgaagcatcagcgtcattcagcaatcttgccaaagtatgcaggctcgcgagaatcgacgtgcgaaaccggctggttgcgccaaagatccgcttgcggagcggtcgaacattcatgctgggacttcaagaggtcgagtagaggaagaaccggaaaggttgcaccggaaaatatgcgttcctttggagagcgcctcatggacgtgaacaaatcgcccggaccaaggatgccacggatacaaaagctcgcgaagctcggtcccgtgggtgttctgtcgtctcgttgtacaacgaaatccattcccattccgcgctcaagatggcttcccctcggcagttcatcagggctaaatcaatctagccgacttgtccggtgaaatgggctgcactccaacagaaacaatcaaacaaacatacacagcgacttattcacacgagctcaaattacaacggtatatatcctgccagtcagcatcatcacaccaaaagttaggcccgaatagtttgaaattagaaagctcgcaattgaggtctacaggccaaattcgctcttagccgtacaatattactcaccggtgcgatgccccccatcgtaggtgaaggtggaaattaatgatccatcttgagaccacaggcccacaacagctaccagtttcctcaagggtccaccaaaaacgtaagcgcttacgtacatggtcgataagaaaaggcaatttgtagatgttaacatccaacgtcgctttcagggatcgatccaatacgcaaaccgcctctccccgcgcgttggccgattcattaatgcagctggcacgacaggtttcccgactggaaagcgggcagtgagcgcaacgcaattaatgtgagttagctcactcattaggcaccccaggctttacactttatgcttccggctcgtatgttgtgtggaattgtgagcggataacaatttcacacaggaaacagctatgaccatgattacgccaagcttgcatgcctgcaggtcgactctagag

SEQ ID NO: 32 - DNA, 13268 bp, Artificial Sequence
  Plasmid pKR92
cgcgcctcgagtgggcggatcccccgggctgcaggaattcactggccgtcgttttacaacgtcgtgactgggaaaaccctggcgttacccaacttaatcgccttgcagcacatccccctttcgccagctggcgtaatagcgaagaggcccgcaccgatcgcccttcccaacagttgcgcagcctgaatggcgaatggatcgatccatcgcgatgtaccttttgttagtcagcctctcgattgctcatcgtcattacacagtaccgaagtttgatcgatctagtaacatagatgacaccgcgcgcgataatttatcctagtttgcgcgctatattttgttttctatcgcgtattaaatgtataattgcgggactctaatcataaaaacccatctcataaataacgtcatgcattacatgttaattattacatgcttaacgtaattcaacagaaattatatgataatcatcgcaagaccggcaacaggattcaatcttaagaaactttattgccaaatgtttgaacgatctgcttcgacgcactccttctttactccaccatctcgtccttattgaaaacgtgggtagcaccaaaacgaatcaagtcgctggaactgaagttaccaatcacgctggatgatttgccagttggattaatcttgcctttccccgcatgaataatattgatgaatgcatgcgtgaggggtagttcgatgttggcaatagctgcaattgccgcgacatcctccaacgagcataattcttcagaaaaatagcgatgttccatgttgtcagggcatgcatgatgcacgttatgaggtgacggtgctaggcagtattccctcaaagtttcatagtcagtatcatattcatcattgcattcctgcaagagagaattgagacgcaatccacacgctgcggcaaccttccggcgttcgtggtctatttgctcttggacgttgcaaacgtaagtgttggatcgatccggggtgggcgaagaactccagcatgagatccccgcgctggaggatcatccagccggcgtcccggaaaacgattccgaagcccaacctttcatagaaggcggcggtggaatcgaaatctcgtgatggcaggttgggcgtcgcttggtcggtcatttcgaaccccagagtcccgctcagaagaactcgtcaagaaggcgatagaaggcgatgcgctgcgaatcgggagcggcgataccgtaaagcacgaggaagcggtcagcccattcgccgccaagctcttcagcaatatcacgggtagccaacgctatgtcctgatagcggtccgccacacccagccggccacagtcgatgaatccagaaaagcggccattttccaccatgatattcggcaagcaggcatcgccatgggtcacgacgagatcctcgccgtcgggcatgcgcgccttgagcctggcgaacagttcggctggcgcgagcccctgatgctcttcgtccagatcatcctgatcgacaagaccggcttccatccgagtacgtgctcgctcgatgcgatgtttcgcttggtggtcgaatgggcaggtagccggatcaagcgtatgcagccgccgcattgcatcagccatgatggatactttctcggcaggagcaaggtgagatgacaggagatcctgccccggcacttcgcccaatagcagccagtcccttcccgcttcagtgacaacgtcgagcacagctgcgcaaggaacgcccgtcgtggccagccacgatagccgcgctgcctcgtcctgcagttcattcagggcaccggacaggtcggtcttgacaaaaagaaccgggcgcccctgcgctgacagccggaacacggcggcatcagagcagccgattgtctgttgtgcccagtcatagccgaatagcctctccacccaagcggccggagaacctgcgtgcaatccatcttgttcaatcatgcgaaacgatccccgcaagcttggagactggtgatttcagcgtgtcctctccaaatgaaatgaacttccttatatagaggaagggtcttgcgaaggatagtgggattgtgcgtcatcccttacgtcagtggagatatcacatcaatccacttgctttgaagacgtggttggaacgtcttctttttccacgatgctcctcgtgggtgggggtccatctttgggaccactgtcggcagaggcatcttcaacgatggcctttcctttatcgcaatgatggcatttgtaggagccaccttccttttccactatcttcacaataaagtgacagatagctgggcaatggaatccgaggaggtttccggatattaccctttgttgaaaagtctcaattgccctttggtcttctgagactgtatctttgatatttttggagtagacaagcgtgtcgtgctccaccatgttgacgaagattttcttcttgtcattgagtcgtaagagactctgtatgaactgttcgccagtctttacggcgagttctgttaggtcctctatttgaatctttgactccatggcctttgattcagtgggaactacctttttagagactccaatctctattacttgccttggtttgtgaagcaagccttgaatcgtccatactggaatagtacttctgatcttgagaaatatatctttctctgtgttcttgatgcagttagtcctgaatcttttgactgcatctttaaccttcttgggaaggtatttgatctcctggagattattgctcgggtagatcgtcttgatgagacctgctgcgtaagcctctctaaccatctgtgggttagcattctttctgaaattgaaaaggctaatcttctcattatcagtggtgaacatggtatcgtcaccttctccgtcgaacttcctgactagatcgtagagatagaggaagtcgtccattgtgatctctggggcaaaggagtctgaattaattcgatatggtggatttatcacaaatgggacccgccgccgacagaggtgtgatgttaggccaggactttgaaaatttgcgcaactatcgtatagtggccgacaaattgacgccgagttgacagactgcctagcatttgagtgaattatgtgaggtaatgggctacactgaattggtagctcaaactgtcagtatttatgtatatgagtgtatattttcgcataatctcagaccaatctgaagatgaaatgggtatctgggaatggcgaaatcaaggcatcgatcgtgaagtttctcatctaagcccccatttggacgtgaatgtagacacgtcgaaataaagatttccgaattagaataatttgtttattgctttcgcctataaatacgacggatcgtaatttgtcgttttatcaaaatgtactttcattttataataacgctgcggacatctacatttttgaattgaaaaaaaattggtaattactctttctttttctccatattgaccatcatactcattgctgatccatgtagatttcccggacatgaagccatttacaattgaatatatcctgccgccgctgccgctttgcacccggtggagcttgcatgttggtttctacgcagaactgagccggttaggcagataatttccattgagaactgagccatgtgcaccttccccccaacacggtgagcgacggggcaacggagtgatccacatgggacttttaaacatcatccgtcggatggcgttgcgagagaagcagtcgatccgtgagatcagccgacgcaccgggcaggcgcgcaacacgatcgcaaagtatttgaacgcaggtacaatcgagccgacgttcacgcggaacgaccaagcaagctagctttaatgcggtagtttatcacagttaaattgctaacgcagtcaggcaccgtgtatgaaatctaacaatgcgctcatcgtcatcctcggcaccgtcaccctggatgctgtaggcataggcttggttatgccggtactgccgggcctcttgcgggatatcgtccattccgacagcatcgccagtcactatggcgtgctgctagcgctatatgcgttgatgcaatttctatgcgcacccgttctcggagcactgtccgaccgctttggccgccgcccagtcctgctcgcttcgctacttggagccactatcgactacgcgatcatggcgaccacacccgtcctgtggtccaacccctccgctgctatagtgcagtcggcttctgacgttcagtgcagccgtcttctgaaaacgacatgtcgcacaagtcctaagttacgcgacaggctgccgccctgcccttttcctggcgttttcttgtcgcgtgttttagtcgcataaagtagaatacttgcgactagaaccggagacattacgccatgaacaagagcgccgccgctggcctgctgggctatgcccgcgtcagcaccgacgaccaggacttgaccaaccaacgggccgaactgcacgcggccggctgcaccaagctgttttccgagaagatcaccggcaccaggcgcgaccgcccggagctggccaggatgcttgaccacctacgccctggcgacgttgtgacagtgaccaggctagaccgcctggcccgcagcacccgcgacctactggacattgccgagcgcatccaggaggccggcgcgggcctgcgtagcctggcagagccgtgggccgacaccaccacgccggccggccgcatggtgttgaccgtgttcgccggcattgccgagttcgagcgttccctaatcatcgaccgcacccggagcgggcgcgaggccgccaaggcccgaggcgtgaagtttggcccccgccctaccctcaccccggcacagatcgcgcacgcccgcgagctgatcgaccaggaaggccgcaccgtgaaagaggcggctgcactgcttggcgtgcatcgctcgaccctgtaccgcgcacttgagcgcagcgaggaagtgacgcccaccgaggccaggcggcgcggtgccttccgtgaggacgcattgaccgaggccgacgccctggcggccgccgagaatgaacgccaagaggaacaagcatgaaaccgcaccaggacggccaggacgaaccgtttttcattaccgaagagatcgaggcggagatgatcgcggccgggtacgtgttcgagccgcccgcgcacgtctcaaccgtgcggctgcatgaaatcctggccggtttgtctgatgccaagctggcggcctggccggccagcttggccgctgaagaaaccgagcgccgccgtctaaaaaggtgatgtgtatttgagtaaaacagcttgcgtcatgcggtcgctgcgtatatgatgcgatgagtaaataaacaaatacgcaagggaacgcatgaagttatcgctgtacttaaccagaaaggcgggtcaggcaagacgaccatcgcaacccatctagcccgcgccctgcaactcgccggggccgatgttctgttagtcgattccgatccccagggcagtgcccgcgattgggcggccgtgcgggaagatcaaccgctaaccgttgtcggcatcgaccgcccgacgattgaccgcgacgtgaaggccatcggccggcgcgacttcgtagtgatcgacggagcgccccaggcggcggacttggctgtgtccgcgatcaaggcagccgacttcgtgctgattccggtgcagccaagcccttacgacatatgggccaccgccgacctggtggagctggttaagcagcgcattgaggtcacggatggaaggctacaagcggcctttgtcgtgtcgcgggcgatcaaaggcacgcgcatcggcggtgaggttgccgaggcgctggccgggtacgagctgcccattcttgagtcccgtatcacgcagcgcgtgagctacccaggcactgccgccgccggcacaaccgttcttgaatcagaacccgagggcgacgctgcccgcgaggtccaggcgctggccgctgaaattaaatcaaaactcatttgagttaatgaggtaaagagaaaatgagcaaaagcacaaacacgctaagtgccggccgtccgagcgcacgcagcagcaaggctgcaacgttggccagcctggcagacacgccagccatgaagcgggtcaactttcagttgccggcggaggatcacaccaagctgaagatgtacgcggtacgccaaggcaagaccattaccgagctgctatctgaatacatcgcgcagctaccagagtaaatgagcaaatgaataaatgagtagatgaattttagcggctaaaggaggcggcatggaaaatcaagaacaaccaggcaccgacgccgtggaatgccccatgtgtggaggaacgggcggttggccaggcgtaagcggctgggttgtctgccggccctgcaatggcactggaacccccaagcccgaggaatcggcgtgagcggtcgcaaaccatccggcccggtacaaatcggcgcggcgctgggtgatgacctggtggagaagttgaaggccgcgcaggccgcccagcggcaacgcatcgaggcagaagcacgccccggtgaatcgtggcaagcggccgctgatcgaatccgcaaagaatcccggcaaccgccggcagccggtgcgccgtcgattaggaagccgcccaagggcgacgagcaaccagattttttcgttccgatgctctatgacgtgggcacccgcgatagtcgcagcatcatggacgtggccgttttccgtctgtcgaagcgtgaccgacgagctggcgaggtgatccgctacgagcttccagacgggcacgtagaggtttccgcagggccggccggcatggccagtgtgtgggattacgacctggtactgatggcggtttcccatctaaccgaatccatgaaccgataccgggaagggaagggagacaagcccggccgcgtgttccgtccacacgttgcggacgtactcaagttctgccggcgagccgatggcggaaagcagaaagacgacctggtagaaacctgcattcggttaaacaccacgcacgttgccatgcagcgtacgaagaaggccaagaacggccgcctggtgacggtatccgagggtgaagccttgattagccgctacaagatcgtaaagagcgaaaccgggcggccggagtacatcgagatcgagctagctgattggatgtaccgcgagatcacagaaggcaagaacccggacgtgctgacggttcaccccgattactttttgatcgatcccggcatcggccgttttctctaccgcctggcacgccgcgccgcaggcaaggcagaagccagatggttgttcaagacgatctacgaacgcagtggcagcgccggagagttcaagaagttctgtttcaccgtgcgcaagctgatcgggtcaaatgacctgccggagtacgatttgaaggaggaggcggggcaggctggcccgatcctagtcatgcgctaccgcaacctgatcgagggcgaagcatccgccggttcctaatgtacggagcagatgctagggcaaattgccctagcaggggaaaaaggtcgaaaaggtctctttcctgtggatagcacgtacattgggaacccaaagccgtacattgggaaccggaacccgtacattgggaacccaaagccgtacattgggaaccggtcacacatgtaagtgactgatataaaagagaaaaaaggcgatttttccgcctaaaactctttaaaacttattaaaactcttaaaacccgcctggcctgtgcataactgtctggccagcgcacagccgaagagctgcaaaaagcgcctacccttcggtcgctgcgctccctacgccccgccgcttcgcgtcggcctatcgcggccgctggccgctcaaaaatggctggcctacggccaggcaatctaccagggcgcggacaagccgcgccgtcgccactcgaccgccggcgcccacatcaaggcaccctgcctcgcgcgtttcggtgatgacggtgaaaacctctgacacatgcagctcccggagacggtcacagcttgtctgtaagcggatgccgggagcagacaagcccgtcagggcgcgtcagcgggtgttggcgggtgtcggggcgcagccatgacccagtcacgtagcgatagcggagtgtatactggcttaactatgcggcatcagagcagattgtactgagagtgcaccatatgcggtgtgaaataccgcacagatgcgtaaggagaaaataccgcatcaggcgctcttccgcttcctcgctcactgactcgctgcgctcggtcgttcggctgcggcgagcggtatcagctcactcaaaggcggtaatacggttatccacagaatcaggggataacgcaggaaagaacatgtgagcaaaaggccagcaaaaggccaggaaccgtaaaaaggccgcgttgctggcgtttttccataggctccgcccccctgacgagcatcacaaaaatcgacgctcaagtcagaggtggcgaaacccgacaggactataaagataccaggcgtttccccctggaagctccctcgtgcgctctcctgttccgaccctgccgcttaccggatacctgtccgcctttctcccttcgggaagcgtggcgctttctcatagctcacgctgtaggtatctcagttcggtgtaggtcgttcgctccaagctgggctgtgtgcacgaaccccccgttcagcccgaccgctgcgccttatccggtaactatcgtcttgagtccaacccggtaagacacgacttatcgccactggcagcagccactggtaacaggattagcagagcgaggtatgtaggcggtgctacagagttcttgaagtggtggcctaactacggctacactagaaggacagtatttggtatctgcgctctgctgaagccagttaccttcggaaaaagagttggtagctcttgatccggcaaacaaaccaccgctggtagcggtggtttttttgtttgcaagcagcagattacgcgcagaaaaaaaggatctcaagaagatcctttgatcttttctacggggtctgacgctcagtggaacgaaaactcacgttaagggattttggtcatgagattatcaaaaaggatcttcacctagatccttttaaattaaaaatgaagttttaaatcaatctaaagtatatatgagtaaacttggtctgacagttaccaatgcttaatcagtgaggcacctatctcagcgatctgtctatttcgttcatccatagttgcctgactccccgtcgtgtagataactacgatacgggagggcttaccatctggccccagtgctgcaatgataccgcgagacccacgctcaccggctccagatttatcagcaataaaccagccagccggaagggccgagcgcagaagtggtcctgcaactttatccgcctccatccagtctattaattgttgccgggaagctagagtaagtagttcgccagttaatagtttgcgcaacgttgttgccattgctacaggcatcgtggtgtcacgctcgtcgtttggtatggcttcattcagctccggttcccaacgatcaaggcgagttacatgatcccccatgttgtgcaaaaaagcggttagctccttcggtcctccgatcgttgtcagaagtaagttggccgcagtgttatcactcatggttatggcagcactgcataattctcttactgtcatgccatccgtaagatgcttttctgtgactggtgagtactcaaccaagtcattctgagaatagtgtatgcggcgaccgagttgctcttgcccggcgtcaacacgggataataccgcgccacatagcagaactttaaaagtgctcatcattggaaaagacctgcaggggggggggggcgctgaggtctgcctcgtgaagaaggtgttgctgactcataccaggcctgaatcgccccatcatccagccagaaagtgagggagccacggttgatgagagctttgttgtaggtggaccagttggtgattttgaacttttgctttgccacggaacggtctgcgttgtcgggaagatgcgtgatctgatccttcaactcagcaaaagttcgatttattcaacaaagccgccgtcccgtcaagtcagcgtaatgctctgccagtgttacaaccaattaaccaattctgattagaaaaactcatcgagcatcaaatgaaactgcaatttattcatatcaggattatcaataccatatttttgaaaaagccgtttctgtaatgaaggagaaaactcaccgaggcagttccataggatggcaagatcctggtatcggtctgcgattccgactcgtccaacatcaatacaacctattaatttcccctcgtcaaaaataaggttatcaagtgagaaatcaccatgagtgacgactgaatccggtgagaatggcaaaagcttatgcatttctttccagacttgttcaacaggccagccattacgctcgtcatcaaaatcactcgcatcaaccaaaccgttattcattcgtgattgcgcctgagcgagacgaaatacgcgatcgctgttaaaaggacaattacaaacaggaatcgaatgcaaccggcgcaggaacactgccagcgcatcaacaatattttcacctgaatcaggatattcttctaatacctggaatgctgttttcccggggatcgcagtggtgagtaaccatgcatcatcaggagtacggataaaatgcttgatggtcggaagaggcataaattccgtcagccagtttagtctgaccatctcatctgtaacatcattggcaacgctacctttgccatgtttcagaaacaactctggcgcatcgggcttcccatacaatcgatagattgtcgcacctgattgcccgacattatcgcgagcccatttatacccatataaatcagcatccatgttggaatttaatcgcggcctcgagcaagacgtttcccgttgaatatggctcataacaccccttgtattactgtttatgtaagcagacagttttattgttcatgatgatatatttttatcttgtgcaatgtaacatcagagattttgagacacaacgtggctttcccccccccccctgcaggtcaattcggtcgatatggctattacgaagaaggctcgtgcgcggagtcccgtgaactttcccacgcaacaagtgaaccgcaccgggtttgccggaggccatttcgttaaaatgcgcagccatggctgcttcgtccagcatggcgtaatactgatcctcgtcttcggctggcggtatattgccgatgggcttcaaaagccgccgtggttgaaccagtctatccattccaaggtagcgaactcgaccgcttcgaagctcctccatggtccacgccgatgaatgacctcggccttgtaaagaccgttgatcgcttctgcgagggcgttgtcgtgctgtcgccgacgcttccgatagatggctcgatacctgcttctgccaaccgctcggaatagcgaaaggacacgtattgaacaccgcgatccgagtgatgcactaggccgccatgagcgggacgccgatcatgatgagcctcctcgagggcatcgaggacaaagcctgcatgtgctgtccggctcgcccgccatccgacaatgcgacgggcgaagacgtcgatcacgaaggccacgtagacgaagccctcccaagtggcgacataagtacggacatgcgcaaaggctttcccggtttgtcgctgatggtgcaagagacgctgaagcgcgatccgatgcgcaggcatctgttcgtcttccgcggtcgtggcggtggcctgatcaaggtcactcgccgaagagctgcatgattggctcgaaaccgagcgggggaaattgtcgcgcagttctcccgtcgccgaggcgataaattacatgctcaagcgatgggatggcattacgtcattcctcgatgacggcccgatttgcctgacgaacaatgctgccgaacgaacgctcagaggctatgtactcggcaggaagtcatggctgtttgccggatcggatcgttgtgctgaacgtgcggcgttcatggcgacactgatcatgagcgccaagctcaataacatcgatccgcaggcctggcttgccgacgtccgcgccgaccttgcggacgctccgatcagcaggcttgagcaacagctgccgtggaactggacatccaagacactgagtgctcaggcggcctgacctgcggccttcaccggatacttaccccattatcgcagattgcgatgaagcatcagcgtcattcagcaatcttgccaaagtatgcaggctcgcgagaatcgacgtgcgaaaccggctggttgcgccaaagatccgcttgcggagcggtcgaacattcatgctgggacttcaagaggtcgagtagaggaagaaccggaaaggttgcaccggaaaatatgcgttcctttggagagcgcctcatggacgtgaacaaatcgcccggaccaaggatgccacggatacaaaagctcgcgaagctcggtcccgtgggtgttctgtcgtctcgttgtacaacgaaatccattcccattccgcgctcaagatggcttcccctcggcagttcatcagggctaaatcaatctagccgacttgtccggtgaaatgggctgcactccaacagaaacaatcaaacaaacatacacagcgacttattcacacgagctcaaattacaacggtatatatcctgccagtcagcatcatcacaccaaaagttaggcccgaatagtttgaaattagaaagctcgcaattgaggtctacaggccaaattcgctcttagccgtacaatattactcaccggtgcgatgccccccatcgtaggtgaaggtggaaattaatgatccatcttgagaccacaggcccacaacagctaccagtttcctcaagggtccaccaaaaacgtaagcgcttacgtacatggtcgataagaaaaggcaatttgtagatgttaacatccaacgtcgctttcagggatcgatccaatacgcaaaccgcctctccccgcgcgttggccgattcattaatgcagctggcacgacaggtttcccgactggaaagcgggcagtgagcgcaacgcaattaatgtgagttagctcactcattaggcaccccaggctttacactttatgcttccggctcgtatgttgtgtggaattgtgagcggataacaatttcacacaggaaacagctatgaccatgattacgccaagcttgcatgcctgcaggtcgactctagaggatctgg

SEQ ID NO: 33 - DNA, 19604 bp, Artificial Sequence
  Plasmid pKR92 YL DGAT2
  misc_feature (4526)..(4526): n is a, c, g, or t
cgcgccaagcttttgatccatgcccttcatttgccgcttattaattaatttggtaacagtccgtactaatcagttacttatccttcccccatcataattaatcttggtagtctcgaatgccacaacactgactagtctcttggatcataagaaaaagccaaggaacaaaagaagacaaaacacaatgagagtatcctttgcatagcaatgtctaagttcataaaattcaaacaaaaacgcaatcacacacagtggacatcacttatccactagctgatcaggatcgccgcgtcaagaaaaaaaaactggaccccaaaagccatgcacaacaacacgtactcacaaaggtgtcaatcgagcagcccaaaacattcaccaactcaacccatcatgagccctcacatttgttgtttctaacccaacctcaaactcgtattctcttccgccacctcatttttgtttatttcaacacccgtcaaactgcatgccaccccgtggccaaatgtccatgcatgttaacaagacctatgactataaatagctgcaatctcggcccaggttttcatcatcaagaaccagttcaatatcctagtacaccgtattaaagaatttaagatatactgcggccgcatgactatcgactcacaatactacaagtcgcgagacaaaaacgacacggcacccaaaatcgcgggaatccgatatgccccgctatcgacaccattactcaaccgatgtgagaccttctctctggtctggcacattttcagcattcccactttcctcacaattttcatgctatgctgcgcaattccactgctctggccatttgtgattgcgtatgtagtgtacgctgttaaagacgactccccgtccaacggaggagtggtcaagcgatactcgcctatttcaagaaacttcttcatctggaagctctttggccgctacttccccataactctgcacaagacggtggatctggagcccacgcacacatactaccctctggacgtccaggagtatcacctgattgctgagagatactggccgcagaacaagtacctccgagcaatcatctccaccatcgagtactttctgcccgccttcatgaaacggtctctttctatcaacgagcaggagcagcctgccgagcgagatcctctcctgtctcccgtttctcccagctctccgggttctcaacctgacaagtggattaaccacgacagcagatatagccgtggagaatcatctggctccaacggccacgcctcgggctccgaacttaacggcaacggcaacaatggcaccactaaccgacgacctttgtcgtccgcctctgctggctccactgcatctgattccacgcttcttaacgggtccctcaactcctacgccaaccagatcattggcgaaaacgacccacagctgtcgcccacaaaactcaagcccactggcagaaaatacatcttcggctaccacccccacggcattatcggcatgggagcctttggtggaattgccaccgagggagctggatggtccaagctctttccgggcatccctgtttctcttatgactctcaccaacaacttccgagtgcctctctacagagagtacctcatgagtctgggagtcgcttctgtctccaagaagtcctgcaaggccctcctcaagcgaaaccagtctatctgcattgtcgttggtggagcacaggaaagtcttctggccagacccggtgtcatggacctggtgctactcaagcgaaagggttttgttcgacttggtatggaggtcggaaatgtcgcccttgttcccatcatggcctttggtgagaacgacctctatgaccaggttagcaacgacaagtcgtccaagctgtaccgattccagcagtttgtcaagaacttccttggattcacccttcctttgatgcatgcccgaggcgtcttcaactacgatgtcggtcttgtcccctacaggcgacccgtcaacattgtggttggttcccccattgacttgccttatctcccacaccccaccgacgaagaagtgtccgaataccacgaccgatacatcgccgagctgcagcgaatctacaacgagcacaaggatgaatatttcatcgattggaccgaggagggcaaaggagccccagagttccgaatgattgagtaagcggccgcaagtatgaactaaaatgcatgtaggtgtaagagctcatggagagcatggaatattgtatccgaccatgtaacagtataataactgagctccatctcacttcttctatgaataaacaaaggatgttatgatatattaacactctatctatgcaccttattgttctatgataaatttcctcttattattataaatcatctgaatcgtgacggcttatggaatgcttcaaatagtacaaaaacaaatgtgtactataagactttctaaacaattctaaccttagcattgtgaacgagacataagtgttaagaagacataacaattataatggaagaagtttgtctccatttatatattatatattacccacttatgtattatattaggatgttaaggagacataacaattataaagagagaagtttgtatccatttatatattatatactacccatttatatattatacttatccacttatttaatgtctttataaggtttgatccatgatatttctaatattttagttgatatgtatatgaaagggtactatttgaactctcttactctgtataaaggttggatcatccttaaagtgggtctatttaattttattgcttcttacagataaaaaaaaaattatgagttggtttgataaaatattgaaggatttaaaataataataaataacatataatatatgtatataaatttattataatataacatttatctataaaaaagtaaatattgtcataaatctatacaatcgtttagccttgctggacgaatctcaattatttaaacgagagtaaacatatttgactttttggttatttaacaaattattatttaacactatatgaaatttttttttttatcagcaaagaataaaattaaattaagaaggacaatggtgtcccaatccttatacaaccaacttccacaagaaagtcaagtcagagacaacaaaaaaacaagcaaaggaaattttttaatttgagttgtcttgtttgctgcataatttatgcagtaaaacactacacataacccttttagcagtagagcaatggttgaccgtgtgcttagcttcttttattttatttttttatcagcaaagaataaataaaataaaatgagacacttcagggatgtttcaacaagcttggatcctcgaagagaagggttaataacacacttttttaacatttttaacacaaattttagttatttaaaaatttattaaaaaatttaaaataagaagaggaactctttaaataaatctaacttacaaaatttatgatttttaataagttttcaccaataaaaaatgtcataaaaatatgttaaaaagtatattatcaatattctctttatgataaataaaaagaaaaaaaaaataaaagttaagtgaaaatgagattgaagtgactttaggtgtgtataaatatatcaaccccgccaacaatttatttaatccaaatatattgaagtatattattccatagcctttatttatttatatatttattatataaaagctttatttgttctaggttgttcatgaaatatttttttggttttatctccgttgtaagaaaatcatgtgctttgtgtcgccactcactattgcagctttttcatgcattggtcagattgacggttgattgtatttttgttttttatggttttgtgttatgacttaagtcttcatctctttatctcttcatcaggtttgatggttacctaatatggtccatgggtacatgcatggttaaattaggtggccaactttgttgtgaacgatagaattttttttatattaagtaaactatttttatattatgaaataataataaaaaaaatattttatcattattaacaaaatcatattagttaatttgttaactctataataaaagaaatactgtaacattcacattacatggtaacatctttccaccctttcatttgttttttgtttgatgactttttttcttgtttaaatttatttcccttcttttaaatttggaatacattatcatcatatataaactaaaatactaaaaacaggattacacaaatgataaataataacacaaatatttataaatctagctgcaatatatttaaactagctatatcgatattgtaaaataaaactagctgcattgatactgataaaaaaatatcatgtgctttctggactgatgatgcagtatacttttgacattgcctttattttatttttcagaaaagctttcttagttctgggttcttcattatttgtttcccatctccattgtgaattgaatcatttgcttcgtgtcacaaatacaatttagntaggtacatgcattggtcagattcacggtttattatgtcatgacttaagttcatggtagtacattacctgccacgcatgcattatattggttagatttgataggcaaatttggttgtcaacaatataaatataaataatgtttttatattacgaaataacagtgatcaaaacaaacagttttatctttattaacaagattttgtttttgtttgatgacgttttttaatgtttacgctttcccccttcttttgaatttagaacactttatcatcataaaatcaaatactaaaaaaattacatatttcataaataataacacaaatatttttaaaaaatctgaaataataatgaacaatattacatattatcacgaaaattcattaataaaaatattatataaataaaatgtaatagtagttatatgtaggaaaaaagtactgcacgcataatatatacaaaaagattaaaatgaactattataaataataacactaaattaatggtgaatcatatcaaaataatgaaaaagtaaataaaatttgtaattaacttctatatgtattacacacacaaataataaataatagtaaaaaaaattatgataaatatttaccatctcataagatatttaaaataatgataaaaatatagattattttttatgcaactagctagccaaaaagagaacacgggtatatataaaaagagtacctttaaattctactgtacttcctttattcctgacgtttttatatcaagtggacatacgtgaagattttaattatcagtctaaatatttcattagcacttaatacttttctgttttattcctatcctataagtagtcccgattctcccaacattgcttattcacacaactaactaagaaagtcttccatagccccccaagcggcccatggcctcctccgaggacgtcatcaaggagttcatgcgcttcaaggtgcgcatggagggctccgtgaacggccacgagttcgagatcgagggcgagggcgagggccgcccctacgagggcacccagaccgccaagctgaaggtgaccaagggcggccccctgcccttcgcctgggacatcctgtccccccagttccagtacggctccaaggtgtacgtgaagcaccccgccgacatccccgactacaagaagctgtccttccccgagggcttcaagtgggagcgcgtgatgaacttcgaggacggcggcgtggtgaccgtgacccaggactcctccctgcaggacggctccttcatctacaaggtgaagttcatcggcgtgaacttcccctccgacggccccgtaatgcagaagaagactatgggctgggaggcctccaccgagcgcctgtacccccgcgacggcgtgctgaagggcgagatccacaaggccctgaagctgaaggacggcggccactacctggtggagttcaagtccatctacatggccaagaagcccgtgcagctgcccggctactactacgtggactccaagctggacatcacctcccacaacgaggactacaccatcgtggagcagtacgagcgcgccgagggccgccaccacctgttcctgtagcggccggccgcgacacaagtgtgagagtactaaataaatgctttggttgtacgaaatcattacactaaataaaataatcaaagcttatatatgccttccgctaaggccgaatgcaaagaaattggttctttctcgttatcttttgccacttttactagtacgtattaattactacttaatcatctttgtttacggctcattatatccgtcgacggcgcgcctcgagtgggcggatcccccgggctgcaggaattcactggccgtcgttttacaacgtcgtgactgggaaaaccctggcgttacccaacttaatcgccttgcagcacatccccctttcgccagctggcgtaatagcgaagaggcccgcaccgatcgcccttcccaacagttgcgcagcctgaatggcgaatggatcgatccatcgcgatgtaccttttgttagtcagcctctcgattgctcatcgtcattacacagtaccgaagtttgatcgatctagtaacatagatgacaccgcgcgcgataatttatcctagtttgcgcgctatattttgttttctatcgcgtattaaatgtataattgcgggactctaatcataaaaacccatctcataaataacgtcatgcattacatgttaattattacatgcttaacgtaattcaacagaaattatatgataatcatcgcaagaccggcaacaggattcaatcttaagaaactttattgccaaatgtttgaacgatctgcttcgacgcactccttctttactccaccatctcgtccttattgaaaacgtgggtagcaccaaaacgaatcaagtcgctggaactgaagttaccaatcacgctggatgatttgccagttggattaatcttgcctttccccgcatgaataatattgatgaatgcatgcgtgaggggtagttcgatgttggcaatagctgcaattgccgcgacatcctccaacgagcataattcttcagaaaaatagcgatgttccatgttgtcagggcatgcatgatgcacgttatgaggtgacggtgctaggcagtattccctcaaagtttcatagtcagtatcatattcatcattgcattcctgcaagagagaattgagacgcaatccacacgctgcggcaaccttccggcgttcgtggtctatttgctcttggacgttgcaaacgtaagtgttggatcgatccggggtgggcgaagaactccagcatgagatccccgcgctggaggatcatccagccggcgtcccggaaaacgattccgaagcccaacctttcatagaaggcggcggtggaatcgaaatctcgtgatggcaggttgggcgtcgcttggtcggtcatttcgaaccccagagtcccgctcagaagaactcgtcaagaaggcgatagaaggcgatgcgctgcgaatcgggagcggcgataccgtaaagcacgaggaagcggtcagcccattcgccgccaagctcttcagcaatatcacgggtagccaacgctatgtcctgatagcggtccgccacacccagccggccacagtcgatgaatccagaaaagcggccattttccaccatgatattcggcaagcaggcatcgccatgggtcacgacgagatcctcgccgtcgggcatgcgcgccttgagcctggcgaacagttcggctggcgcgagcccctgatgctcttcgtccagatcatcctgatcgacaagaccggcttccatccgagtacgtgctcgctcgatgcgatgtttcgcttggtggtcgaatgggcaggtagccggatcaagcgtatgcagccgccgcattgcatcagccatgatggatactttctcggcaggagcaaggtgagatgacaggagatcctgccccggcacttcgcccaatagcagccagtcccttcccgcttcagtgacaacgtcgagcacagctgcgcaaggaacgcccgtcgtggccagccacgatagccgcgctgcctcgtcctgcagttcattcagggcaccggacaggtcggtcttgacaaaaagaaccgggcgcccctgcgctgacagccggaacacggcggcatcagagcagccgattgtctgttgtgcccagtcatagccgaatagcctctccacccaagcggccggagaacctgcgtgcaatccatcttgttcaatcatgcgaaacgatccccgcaagcttggagactggtgatttcagcgtgtcctctccaaatgaaatgaacttccttatatagaggaagggtcttgcgaaggatagtgggattgtgcgtcatcccttacgtcagtggagatatcacatcaatccacttgctttgaagacgtggttggaacgtcttctttttccacgatgctcctcgtgggtgggggtccatctttgggaccactgtcggcagaggcatcttcaacgatggcctttcctttatcgcaatgatggcatttgtaggagccaccttccttttccactatcttcacaataaagtgacagatagctgggcaatggaatccgaggaggtttccggatattaccctttgttgaaaagtctcaattgccctttggtcttctgagactgtatctttgatatttttggagtagacaagcgtgtcgtgctccaccatgttgacgaagattttcttcttgtcattgagtcgtaagagactctgtatgaactgttcgccagtctttacggcgagttctgttaggtcctctatttgaatctttgactccatggcctttgattcagtgggaactacctttttagagactccaatctctattacttgccttggtttgtgaagcaagccttgaatcgtccatactggaatagtacttctgatcttgagaaatatatctttctctgtgttcttgatgcagttagtcctgaatcttttgactgcatctttaaccttcttgggaaggtatttgatctcctggagattattgctcgggtagatcgtcttgatgagacctgctgcgtaagcctctctaaccatctgtgggttagcattctttctgaaattgaaaaggctaatcttctcattatcagtggtgaacatggtatcgtcaccttctccgtcgaacttcctgactagatcgtagagatagaggaagtcgtccattgtgatctctggggcaaaggagtctgaattaattcgatatggtggatttatcacaaatgggacccgccgccgacagaggtgtgatgttaggccaggactttgaaaatttgcgcaactatcgtatagtggccgacaaattgacgccgagttgacagactgcctagcatttgagtgaattatgtgaggtaatgggctacactgaattggtagctcaaactgtcagtatttatgtatatgagtgtatattttcgcataatctcagaccaatctgaagatgaaatgggtatctgggaatggcgaaatcaaggcatcgatcgtgaagtttctcatctaagcccccatttggacgtgaatgtagacacgtcgaaataaagatttccgaattagaataatttgtttattgctttcgcctataaatacgacggatcgtaatttgtcgttttatcaaaatgtactttcattttataataacgctgcggacatctacatttttgaattgaaaaaaaattggtaattactctttctttttctccatattgaccatcatactcattgctgatccatgtagatttcccggacatgaagccatttacaattgaatatatcctgccgccgctgccgctttgcacccggtggagcttgcatgttggtttctacgcagaactgagccggttaggcagataatttccattgagaactgagccatgtgcaccttccccccaacacggtgagcgacggggcaacggagtgatccacatgggacttttaaacatcatccgtcggatggcgttgcgagagaagcagtcgatccgtgagatcagccgacgcaccgggcaggcgcgcaacacgatcgcaaagtatttgaacgcaggtacaatcgagccgacgttcacgcggaacgaccaagcaagctagctttaatgcggtagtttatcacagttaaattgctaacgcagtcaggcaccgtgtatgaaatctaacaatgcgctcatcgtcatcctcggcaccgtcaccctggatgctgtaggcataggcttggttatgccggtactgccgggcctcttgcgggatatcgtccattccgacagcatcgccagtcactatggcgtgctgctagcgctatatgcgttgatgcaatttctatgcgcacccgttctcggagcactgtccgaccgctttggccgccgcccagtcctgctcgcttcgctacttggagccactatcgactacgcgatcatggcgaccacacccgtcctgtggtccaacccctccgctgctatagtgcagtcggcttctgacgttcagtgcagccgtcttctgaaaacgacatgtcgcacaagtcctaagttacgcgacaggctgccgccctgcccttttcctggcgttttcttgtcgcgtgttttagtcgcataaagtagaatacttgcgactagaaccggagacattacgccatgaacaagagcgccgccgctggcctgctgggctatgcccgcgtcagcaccgacgaccaggacttgaccaaccaacgggccgaactgcacgcggccggctgcaccaagctgttttccgagaagatcaccggcaccaggcgcgaccgcccggagctggccaggatgcttgaccacctacgccctggcgacgttgtgacagtgaccaggctagaccgcctggcccgcagcacccgcgacctactggacattgccgagcgcatccaggaggccggcgcgggcctgcgtagcctggcagagccgtgggccgacaccaccacgccggccggccgcatggtgttgaccgtgttcgccggcattgccgagttcgagcgttccctaatcatcgaccgcacccggagcgggcgcgaggccgccaaggcccgaggcgtgaagtttggcccccgccctaccctcaccccggcacagatcgcgcacgcccgcgagctgatcgaccaggaaggccgcaccgtgaaagaggcggctgcactgcttggcgtgcatcgctcgaccctgtaccgcgcacttgagcgcagcgaggaagtgacgcccaccgaggccaggcggcgcggtgccttccgtgaggacgcattgaccgaggccgacgccctggcggccgccgagaatgaacgccaagaggaacaagcatgaaaccgcaccaggacggccaggacgaaccgtttttcattaccgaagagatcgaggcggagatgatcgcggccgggtacgtgttcgagccgcccgcgcacgtctcaaccgtgcggctgcatgaaatcctggccggtttgtctgatgccaagctggcggcctggccggccagcttggccgctgaagaaaccgagcgccgccgtctaaaaaggtgatgtgtatttgagtaaaacagcttgcgtcatgcggtcgctgcgtatatgatgcgatgagtaaataaacaaatacgcaagggaacgcatgaagttatcgctgtacttaaccagaaaggcgggtcaggcaagacgaccatcgcaacccatctagcccgcgccctgcaactcgccggggccgatgttctgttagtcgattccgatccccagggcagtgcccgcgattgggcggccgtgcgggaagatcaaccgctaaccgttgtcggcatcgaccgcccgacgattgaccgcgacgtgaaggccatcggccggcgcgacttcgtagtgatcgacggagcgccccaggcggcggacttggctgtgtccgcgatcaaggcagccgacttcgtgctgattccggtgcagccaagcccttacgacatatgggccaccgccgacctggtggagctggttaagcagcgcattgaggtcacggatggaaggctacaagcggcctttgtcgtgtcgcgggcgatcaaaggcacgcgcatcggcggtgaggttgccgaggcgctggccgggtacgagctgcccattcttgagtcccgtatcacgcagcgcgtgagctacccaggcactgccgccgccggcacaaccgttcttgaatcagaacccgagggcgacgctgcccgcgaggtccaggcgctggccgctgaaattaaatcaaaactcatttgagttaatgaggtaaagagaaaatgagcaaaagcacaaacacgctaagtgccggccgtccgagcgcacgcagcagcaaggctgcaacgttggccagcctggcagacacgccagccatgaagcgggtcaactttcagttgccggcggaggatcacaccaagctgaagatgtacgcggtacgccaaggcaagaccattaccgagctgctatctgaatacatcgcgcagctaccagagtaaatgagcaaatgaataaatgagtagatgaattttagcggctaaaggaggcggcatggaaaatcaagaacaaccaggcaccgacgccgtggaatgccccatgtgtggaggaacgggcggttggccaggcgtaagcggctgggttgtctgccggccctgcaatggcactggaacccccaagcccgaggaatcggcgtgagcggtcgcaaaccatccggcccggtacaaatcggcgcggcgctgggtgatgacctggtggagaagttgaaggccgcgcaggccgcccagcggcaacgcatcgaggcagaagcacgccccggtgaatcgtggcaagcggccgctgatcgaatccgcaaagaatcccggcaaccgccggcagccggtgcgccgtcgattaggaagccgcccaagggcgacgagcaaccagattttttcgttccgatgctctatgacgtgggcacccgcgatagtcgcagcatcatggacgtggccgttttccgtctgtcgaagcgtgaccgacgagctggcgaggtgatccgctacgagcttccagacgggcacgtagaggtttccgcagggccggccggcatggccagtgtgtgggattacgacctggtactgatggcggtttcccatctaaccgaatccatgaaccgataccgggaagggaagggagacaagcccggccgcgtgttccgtccacacgttgcggacgtactcaagttctgccggcgagccgatggcggaaagcagaaagacgacctggtagaaacctgcattcggttaaacaccacgcacgttgccatgcagcgtacgaagaaggccaagaacggccgcctggtgacggtatccgagggtgaagccttgattagccgctacaagatcgtaaagagcgaaaccgggcggccggagtacatcgagatcgagctagctgattggatgtaccgcgagatcacagaaggcaagaacccggacgtgctgacggttcaccccgattactttttgatcgatcccggcatcggccgttttctctaccgcctggcacgccgcgccgcaggcaaggcagaagccagatggttgttcaagacgatctacgaacgcagtggcagcgccggagagttcaagaagttctgtttcaccgtgcgcaagctgatcgggtcaaatgacctgccggagtacgatttgaaggaggaggcggggcaggctggcccgatcctagtcatgcgctaccgcaacctgatcgagggcgaagcatccgccggttcctaatgtacggagcagatgctagggcaaattgccctagcaggggaaaaaggtcgaaaaggtctctttcctgtggatagcacgtacattgggaacccaaagccgtacattgggaaccggaacccgtacattgggaacccaaagccgtacattgggaaccggtcacacatgtaagtgactgatataaaagagaaaaaaggcgatttttccgcctaaaactctttaaaacttattaaaactcttaaaacccgcctggcctgtgcataactgtctggccagcgcacagccgaagagctgcaaaaagcgcctacccttcggtcgctgcgctccctacgccccgccgcttcgcgtcggcctatcgcggccgctggccgctcaaaaatggctggcctacggccaggcaatctaccagggcgcggacaagccgcgccgtcgccactcgaccgccggcgcccacatcaaggcaccctgcctcgcgcgtttcggtgatgacggtgaaaacctctgacacatgcagctcccggagacggtcacagcttgtctgtaagcggatgccgggagcagacaagcccgtcagggcgcgtcagcgggtgttggcgggtgtcggggcgcagccatgacccagtcacgtagcgatagcggagtgtatactggcttaactatgcggcatcagagcagattgtactgagagtgcaccatatgcggtgtgaaataccgcacagatgcgtaaggagaaaataccgcatcaggcgctcttccgcttcctcgctcactgactcgctgcgctcggtcgttcggctgcggcgagcggtatcagctcactcaaaggcggtaatacggttatccacagaatcaggggataacgcaggaaagaacatgtgagcaaaaggccagcaaaaggccaggaaccgtaaaaaggccgcgttgctggcgtttttccataggctccgcccccctgacgagcatcacaaaaatcgacgctcaagtcagaggtggcgaaacccgacaggactataaagataccaggcgtttccccctggaagctccctcgtgcgctctcctgttccgaccctgccgcttaccggatacctgtccgcctttctcccttcgggaagcgtggcgctttctcatagctcacgctgtaggtatctcagttcggtgtaggtcgttcgctccaagctgggctgtgtgcacgaaccccccgttcagcccgaccgctgcgccttatccggtaactatcgtcttgagtccaacccggtaagacacgacttatcgccactggcagcagccactggtaacaggattagcagagcgaggtatgtaggcggtgctacagagttcttgaagtggtggcctaactacggctacactagaaggacagtatttggtatctgcgctctgctgaagccagttaccttcggaaaaagagttggtagctcttgatccggcaaacaaaccaccgctggtagcggtggtttttttgtttgcaagcagcagattacgcgcagaaaaaaaggatctcaagaagatcctttgatcttttctacggggtctgacgctcagtggaacgaaaactcacgttaagggattttggtcatgagattatcaaaaaggatcttcacctagatccttttaaattaaaaatgaagttttaaatcaatctaaagtatatatgagtaaacttggtctgacagttaccaatgcttaatcagtgaggcacctatctcagcgatctgtctatttcgttcatccatagttgcctgactccccgtcgtgtagataactacgatacgggagggcttaccatctggccccagtgctgcaatgataccgcgagacccacgctcaccggctccagatttatcagcaataaaccagccagccggaagggccgagcgcagaagtggtcctgcaactttatccgcctccatccagtctattaattgttgccgggaagctagagtaagtagttcgccagttaatagtttgcgcaacgttgttgccattgctacaggcatcgtggtgtcacgctcgtcgtttggtatggcttcattcagctccggttcccaacgatcaaggcgagttacatgatcccccatgttgtgcaaaaaagcggttagctccttcggtcctccgatcgttgtcagaagtaagttggccgcagtgttatcactcatggttatggcagcactgcataattctcttactgtcatgccatccgtaagatgcttttctgtgactggtgagtactcaaccaagtcattctgagaatagtgtatgcggcgaccgagttgctcttgcccggcgtcaacacgggataataccgcgccacatagcagaactttaaaagtgctcatcattggaaaagacctgcaggggggggggggcgctgaggtctgcctcgtgaagaaggtgttgctgactcataccaggcctgaatcgccccatcatccagccagaaagtgagggagccacggttgatgagagctttgttgtaggtggaccagttggtgattttgaacttttgctttgccacggaacggtctgcgttgtcgggaagatgcgtgatctgatccttcaactcagcaaaagttcgatttattcaacaaagccgccgtcccgtcaagtcagcgtaatgctctgccagtgttacaaccaattaaccaattctgattagaaaaactcatcgagcatcaaatgaaactgcaatttattcatatcaggattatcaataccatatttttgaaaaagccgtttctgtaatgaaggagaaaactcaccgaggcagttccataggatggcaagatcctggtatcggtctgcgattccgactcgtccaacatcaatacaacctattaatttcccctcgtcaaaaataaggttatcaagtgagaaatcaccatgagtgacgactgaatccggtgagaatggcaaaagcttatgcatttctttccagacttgttcaacaggccagccattacgctcgtcatcaaaatcactcgcatcaaccaaaccgttattcattcgtgattgcgcctgagcgagacgaaatacgcgatcgctgttaaaaggacaattacaaacaggaatcgaatgcaaccggcgcaggaacactgccagcgcatcaacaatattttcacctgaatcaggatattcttctaatacctggaatgctgttttcccggggatcgcagtggtgagtaaccatgcatcatcaggagtacggataaaatgcttgatggtcggaagaggcataaattccgtcagccagtttagtctgaccatctcatctgtaacatcattggcaacgctacctttgccatgtttcagaaacaactctggcgcatcgggcttcccatacaatcgatagattgtcgcacctgattgcccgacattatcgcgagcccatttatacccatataaatcagcatccatgttggaatttaatcgcggcctcgagcaagacgtttcccgttgaatatggctcataacaccccttgtattactgtttatgtaagcagacagttttattgttcatgatgatatatttttatcttgtgcaatgtaacatcagagattttgagacacaacgtggctttcccccccccccctgcaggtcaattcggtcgatatggctattacgaagaaggctcgtgcgcggagtcccgtgaactttcccacgcaacaagtgaaccgcaccgggtttgccggaggccatttcgttaaaatgcgcagccatggctgcttcgtccagcatggcgtaatactgatcctcgtcttcggctggcggtatattgccgatgggcttcaaaagccgccgtggttgaaccagtctatccattccaaggtagcgaactcgaccgcttcgaagctcctccatggtccacgccgatgaatgacctcggccttgtaaagaccgttgatcgcttctgcgagggcgttgtcgtgctgtcgccgacgcttccgatagatggctcgatacctgcttctgccaaccgctcggaatagcgaaaggacacgtattgaacaccgcgatccgagtgatgcactaggccgccatgagcgggacgccgatcatgatgagcctcctcgagggcatcgaggacaaagcctgcatgtgctgtccggctcgcccgccatccgacaatgcgacgggcgaagacgtcgatcacgaaggccacgtagacgaagccctcccaagtggcgacataagtacggacatgcgcaaaggctttcccggtttgtcgctgatggtgcaagagacgctgaagcgcgatccgatgcgcaggcatctgttcgtcttccgcggtcgtggcggtggcctgatcaaggtcactcgccgaagagctgcatgattggctcgaaaccgagcgggggaaattgtcgcgcagttctcccgtcgccgaggcgataaattacatgctcaagcgatgggatggcattacgtcattcctcgatgacggcccgatttgcctgacgaacaatgctgccgaacgaacgctcagaggctatgtactcggcaggaagtcatggctgtttgccggatcggatcgttgtgctgaacgtgcggcgttcatggcgacactgatcatgagcgccaagctcaataacatcgatccgcaggcctggcttgccgacgtccgcgccgaccttgcggacgctccgatcagcaggcttgagcaacagctgccgtggaactggacatccaagacactgagtgctcaggcggcctgacctgcggccttcaccggatacttaccccattatcgcagattgcgatgaagcatcagcgtcattcagcaatcttgccaaagtatgcaggctcgcgagaatcgacgtgcgaaaccggctggttgcgccaaagatccgcttgcggagcggtcgaacattcatgctgggacttcaagaggtcgagtagaggaagaaccggaaaggttgcaccggaaaatatgcgttcctttggagagcgcctcatggacgtgaacaaatcgcccggaccaaggatgccacggatacaaaagctcgcgaagctcggtcccgtgggtgttctgtcgtctcgttgtacaacgaaatccattcccattccgcgctcaagatggcttcccctcggcagttcatcagggctaaatcaatctagccgacttgtccggtgaaatgggctgcactccaacagaaacaatcaaacaaacatacacagcgacttattcacacgagctcaaattacaacggtatatatcctgccagtcagcatcatcacaccaaaagttaggcccgaatagtttgaaattagaaagctcgcaattgaggtctacaggccaaattcgctcttagccgtacaatattactcaccggtgcgatgccccccatcgtaggtgaaggtggaaattaatgatccatcttgagaccacaggcccacaacagctaccagtttcctcaagggtccaccaaaaacgtaagcgcttacgtacatggtcgataagaaaaggcaatttgtagatgttaacatccaacgtcgctttcagggatcgatccaatacgcaaaccgcctctccccgcgcgttggccgattcattaatgcagctggcacgacaggtttcccgactggaaagcgggcagtgagcgcaacgcaattaatgtgagttagctcactcattaggcaccccaggctttacactttatgcttccggctcgtatgttgtgtggaattgtgagcggataacaatttcacacaggaaacagctatgaccatgattacgccaagcttgcatgcctgcaggtcgactctagaggatctgg

SEQ ID NO: 34 - DNA, 20082 bp, Artificial Sequence
  Plasmid pKR92 YL DGAT1 YL DGAT2
cgcgccaagcttttgatccatgcccttcatttgccgcttattaattaatttggtaacagtccgtactaatcagttacttatccttcccccatcataattaatcttggtagtctcgaatgccacaacactgactagtctcttggatcataagaaaaagccaaggaacaaaagaagacaaaacacaatgagagtatcctttgcatagcaatgtctaagttcataaaattcaaacaaaaacgcaatcacacacagtggacatcacttatccactagctgatcaggatcgccgcgtcaagaaaaaaaaactggaccccaaaagccatgcacaacaacacgtactcacaaaggtgtcaatcgagcagcccaaaacattcaccaactcaacccatcatgagccctcacatttgttgtttctaacccaacctcaaactcgtattctcttccgccacctcatttttgtttatttcaacacccgtcaaactgcatgccaccccgtggccaaatgtccatgcatgttaacaagacctatgactataaatagctgcaatctcggcccaggttttcatcatcaagaaccagttcaatatcctagtacaccgtattaaagaatttaagatatactgcggccgcatgactatcgactcacaatactacaagtcgcgagacaaaaacgacacggcacccaaaatcgcgggaatccgatatgccccgctatcgacaccattactcaaccgatgtgagaccttctctctggtctggcacattttcagcattcccactttcctcacaattttcatgctatgctgcgcaattccactgctctggccatttgtgattgcgtatgtagtgtacgctgttaaagacgactccccgtccaacggaggagtggtcaagcgatactcgcctatttcaagaaacttcttcatctggaagctctttggccgctacttccccataactctgcacaagacggtggatctggagcccacgcacacatactaccctctggacgtccaggagtatcacctgattgctgagagatactggccgcagaacaagtacctccgagcaatcatctccaccatcgagtactttctgcccgccttcatgaaacggtctctttctatcaacgagcaggagcagcctgccgagcgagatcctctcctgtctcccgtttctcccagctctccgggttctcaacctgacaagtggattaaccacgacagcagatatagccgtggagaatcatctggctccaacggccacgcctcgggctccgaacttaacggcaacggcaacaatggcaccactaaccgacgacctttgtcgtccgcctctgctggctccactgcatctgattccacgcttcttaacgggtccctcaactcctacgccaaccagatcattggcgaaaacgacccacagctgtcgcccacaaaactcaagcccactggcagaaaatacatcttcggctaccacccccacggcattatcggcatgggagcctttggtggaattgccaccgagggagctggatggtccaagctctttccgggcatccctgtttctcttatgactctcaccaacaacttccgagtgcctctctacagagagtacctcatgagtctgggagtcgcttctgtctccaagaagtcctgcaaggccctcctcaagcgaaaccagtctatctgcattgtcgttggtggagcacaggaaagtcttctggccagacccggtgtcatggacctggtgctactcaagcgaaagggttttgttcgacttggtatggaggtcggaaatgtcgcccttgttcccatcatggcctttggtgagaacgacctctatgaccaggttagcaacgacaagtcgtccaagctgtaccgattccagcagtttgtcaagaacttccttggattcacccttcctttgatgcatgcccgaggcgtcttcaactacgatgtcggtcttgtcccctacaggcgacccgtcaacattgtggttggttcccccattgacttgccttatctcccacaccccaccgacgaagaagtgtccgaataccacgaccgatacatcgccgagctgcagcgaatctacaacgagcacaaggatgaatatttcatcgattggaccgaggagggcaaaggagccccagagttccgaatgattgagtaagcggccgcaagtatgaactaaaatgcatgtaggtgtaagagctcatggagagcatggaatattgtatccgaccatgtaacagtataataactgagctccatctcacttcttctatgaataaacaaaggatgttatgatatattaacactctatctatgcaccttattgttctatgataaatttcctcttattattataaatcatctgaatcgtgacggcttatggaatgcttcaaatagtacaaaaacaaatgtgtactataagactttctaaacaattctaaccttagcattgtgaacgagacataagtgttaagaagacataacaattataatggaagaagtttgtctccatttatatattatatattacccacttatgtattatattaggatgttaaggagacataacaattataaagagagaagtttgtatccatttatatattatatactacccatttatatattatacttatccacttatttaatgtctttataaggtttgatccatgatatttctaatattttagttgatatgtatatgaaagggtactatttgaactctcttactctgtataaaggttggatcatccttaaagtgggtctatttaattttattgcttcttacagataaaaaaaaaattatgagttggtttgataaaatattgaaggatttaaaataataataaataacatataatatatgtatataaatttattataatataacatttatctataaaaaagtaaatattgtcataaatctatacaatcgtttagccttgctggacgaatctcaattatttaaacgagagtaaacatatttgactttttggttatttaacaaattattatttaacactatatgaaatttttttttttatcagcaaagaataaaattaaattaagaaggacaatggtgtcccaatccttatacaaccaacttccacaagaaagtcaagtcagagacaacaaaaaaacaagcaaaggaaattttttaatttgagttgtcttgtttgctgcataatttatgcagtaaaacactacacataacccttttagcagtagagcaatggttgaccgtgtgcttagcttcttttattttatttttttatcagcaaagaataaataaaataaaatgagacacttcagggatgtttcaacaagcttggatcctagcctaagtacgtactcaaaatgccaacaaataaaaaaaaagttgctttaataatgccaaaacaaattaataaaacacttacaacaccggattttttttaattaaaatgtgccatttaggataaatagttaatatttttaataattatttaaaaagccgtatctactaaaatgatttttatttggttgaaaatattaatatgtttaaatcaacacaatctatcaaaattaaactaaaaaaaaaataagtgtacgtggttaacattagtacagtaatataagaggaaaatgagaaattaagaaattgaaagcgagtctaatttttaaattatgaacctgcatatataaaaggaaagaaagaatccaggaagaaaagaaatgaaaccatgcatggtcccctcgtcatcacgagtttctgccatttgcaatagaaacactgaaacacctttctctttgtcacttaattgagatgccgaagccacctcacaccatgaacttcatgaggtgtagcacccaaggcttccatagccatgcatactgaagaatgtctcaagctcagcaccctacttctgtgacgtgtccctcattcaccttcctctcttccctataaataaccacgcctcaggttctccgcttcacaactcaaacattctctccattggtccttaaacactcatcagtcatcaccatggaggtccgacgacgaaagatagacgtgctcaaggcccagaaaaacggctacgaatcgggcccaccatctcgacaatcgtcgcagccctcctcaagagcatcgtccagaacccgcaacaaacactcctcgtccaccctgtcgctcagcggactgaccatgaaagtccagaagaaacctgcgggacccccggcgaactccaaaacgccattcctacacatcaagcccgtgcacacgtgctgctccacatcaatgctttcgcgcgattatgacggctccaaccccagcttcaagggcttcaaaaacatcggcatgatcattctcattgtgggaaatctacggctcgcattcgaaaactacctcaaatacggcatttccaacccgttcttcgaccccaaaattactccttccgagtggcagctctcaggcttgctcatagtcgtggcctacgcacatatcctcatggcctacgctattgagagcgctgccaagctgctgttcctctctagcaaacaccactacatggccgtggggcttctgcataccatgaacactttgtcgtccatctcgttgctgtcctacgtcgtctactactacctgcccaaccccgtggcaggcacaatagtcgagtttgtggccgttattctgtctctcaaactcgcctcatacgccctcactaactcggatctccgaaaagccgcaattcatgcccagaagctcgacaagacgcaagacgataacgaaaaggaatccacctcgtcttcctcttcttcagatgacgcagagactttggcagacattgacgtcattcctgcatactacgcacagctgccctacccccagaatgtgacgctgtcgaacctgctgtacttctggtttgctcccacactggtctaccagcccgtgtaccccaagacggagcgtattcgacccaagcacgtgatccgaaacctgtttgagctcgtctctctgtgcatgcttattcagtttctcatcttccagtacgcctaccccatcatgcagtcgtgtctggctctgttcttccagcccaagctcgattatgccaacatctccgagcgcctcatgaagttggcctccgtgtctatgatggtctggctcattggattctacgctttcttccagaacggtctcaatcttattgccgagctcacctgttttggaaacagaaccttctaccagcagtggtggaattcccgctccattggccagtactggactctatggaacaagccagtcaaccagtactttagacaccacgtctacgtgcctcttctcgctcggggcatgtcgcggttcaatgcgtcggtggtggttttctttttctccgccgtcatccatgaactgcttgtcggcatccccactcacaacatcatcggagccgccttcttcggcatgatgtcgcaggtgcctctgatcatggctactgagaaccttcagcatattaactcctctctgggccccttccttggcaactgtgcattctggttcacctttttcctgggacaacccacttgtgcattcctttactatttggcctacaactacaagcagaaccagtagcggccgcaagtatgaactaaaatgcatgtaggtgtaagagctcatggagagcatggaatattgtatccgaccatgtaacagtataataactgagctccatctcacttcttctatgaataaacaaaggatgttatgatatattaacactctatctatgcaccttattgttctatgataaatttcctcttattattataaatcatctgaatcgtgacggcttatggaatgcttcaaatagtacaaaaacaaatgtgtactataagactttctaaacaattctaaccttagcattgtgaacgagacataagtgttaagaagacataacaattataatggaagaagtttgtctccatttatatattatatattacccacttatgtattatattaggatgttaaggagacataacaattataaagagagaagtttgtatccatttatatattatatactacccatttatatattatacttatccacttatttaatgtctttataaggtttgatccatgatatttctaatattttagttgatatgtatatgaaagggtactatttgaactctcttactctgtataaaggttggatcatccttaaagtgggtctatttaattttattgcttcttacagataaaaaaaaaattatgagttggtttgataaaatattgaaggatttaaaataataataaataacatataatatatgtatataaatttattataatataacatttatctataaaaaagtaaatattgtcataaatctatacaatcgtttagccttgctggacgaatctcaattatttaaacgagagtaaacatatttgactttttggttatttaacaaattattatttaacactatatgaaatttttttttttatcagcaaagaataaaattaaattaagaaggacaatggtgtcccaatccttatacaaccaacttccacaagaaagtcaagtcagagacaacaaaaaaacaagcaaaggaaattttttaatttgagttgtcttgtttgctgcataatttatgcagtaaaacactacacataacccttttagcagtagagcaatggttgaccgtgtgcttagcttcttttattttatttttttatcagcaaagaataaataaaataaaatgagacacttcagggatgtttcaacaagctctagactggaattcgtcgacggcgcgcctcgagtgggcggatcccccgggctgcaggaattcactggccgtcgttttacaacgtcgtgactgggaaaaccctggcgttacccaacttaatcgccttgcagcacatccccctttcgccagctggcgtaatagcgaagaggcccgcaccgatcgcccttcccaacagttgcgcagcctgaatggcgaatggatcgatccatcgcgatgtaccttttgttagtcagcctctcgattgctcatcgtcattacacagtaccgaagtttgatcgatctagtaacatagatgacaccgcgcgcgataatttatcctagtttgcgcgctatattttgttttctatcgcgtattaaatgtataattgcgggactctaatcataaaaacccatctcataaataacgtcatgcattacatgttaattattacatgcttaacgtaattcaacagaaattatatgataatcatcgcaagaccggcaacaggattcaatcttaagaaactttattgccaaatgtttgaacgatctgcttcgacgcactccttctttactccaccatctcgtccttattgaaaacgtgggtagcaccaaaacgaatcaagtcgctggaactgaagttaccaatcacgctggatgatttgccagttggattaatcttgcctttccccgcatgaataatattgatgaatgcatgcgtgaggggtagttcgatgttggcaatagctgcaattgccgcgacatcctccaacgagcataattcttcagaaaaatagcgatgttccatgttgtcagggcatgcatgatgcacgttatgaggtgacggtgctaggcagtattccctcaaagtttcatagtcagtatcatattcatcattgcattcctgcaagagagaattgagacgcaatccacacgctgcggcaaccttccggcgttcgtggtctatttgctcttggacgttgcaaacgtaagtgttggatcgatccggggtgggcgaagaactccagcatgagatccccgcgctggaggatcatccagccggcgtcccggaaaacgattccgaagcccaacctttcatagaaggcggcggtggaatcgaaatctcgtgatggcaggttgggcgtcgcttggtcggtcatttcgaaccccagagtcccgctcagaagaactcgtcaagaaggcgatagaaggcgatgcgctgcgaatcgggagcggcgataccgtaaagcacgaggaagcggtcagcccattcgccgccaagctcttcagcaatatcacgggtagccaacgctatgtcctgatagcggtccgccacacccagccggccacagtcgatgaatccagaaaagcggccattttccaccatgatattcggcaagcaggcatcgccatgggtcacgacgagatcctcgccgtcgggcatgcgcgccttgagcctggcgaacagttcggctggcgcgagcccctgatgctcttcgtccagatcatcctgatcgacaagaccggcttccatccgagtacgtgctcgctcgatgcgatgtttcgcttggtggtcgaatgggcaggtagccggatcaagcgtatgcagccgccgcattgcatcagccatgatggatactttctcggcaggagcaaggtgagatgacaggagatcctgccccggcacttcgcccaatagcagccagtcccttcccgcttcagtgacaacgtcgagcacagctgcgcaaggaacgcccgtcgtggccagccacgatagccgcgctgcctcgtcctgcagttcattcagggcaccggacaggtcggtcttgacaaaaagaaccgggcgcccctgcgctgacagccggaacacggcggcatcagagcagccgattgtctgttgtgcccagtcatagccgaatagcctctccacccaagcggccggagaacctgcgtgcaatccatcttgttcaatcatgcgaaacgatccccgcaagcttggagactggtgatttcagcgtgtcctctccaaatgaaatgaacttccttatatagaggaagggtcttgcgaaggatagtgggattgtgcgtcatcccttacgtcagtggagatatcacatcaatccacttgctttgaagacgtggttggaacgtcttctttttccacgatgctcctcgtgggtgggggtccatctttgggaccactgtcggcagaggcatcttcaacgatggcctttcctttatcgcaatgatggcatttgtaggagccaccttccttttccactatcttcacaataaagtgacagatagctgggcaatggaatccgaggaggtttccggatattaccctttgttgaaaagtctcaattgccctttggtcttctgagactgtatctttgatatttttggagtagacaagcgtgtcgtgctccaccatgttgacgaagattttcttcttgtcattgagtcgtaagagactctgtatgaactgttcgccagtctttacggcgagttctgttaggtcctctatttgaatctttgactccatggcctttgattcagtgggaactacctttttagagactccaatctctattacttgccttggtttgtgaagcaagccttgaatcgtccatactggaatagtacttctgatcttgagaaatatatctttctctgtgttcttgatgcagttagtcctgaatcttttgactgcatctttaaccttcttgggaaggtatttgatctcctggagattattgctcgggtagatcgtcttgatgagacctgctgcgtaagcctctctaaccatctgtgggttagcattctttctgaaattgaaaaggctaatcttctcattatcagtggtgaacatggtatcgtcaccttctccgtcgaacttcctgactagatcgtagagatagaggaagtcgtccattgtgatctctggggcaaaggagtctgaattaattcgatatggtggatttatcacaaatgggacccgccgccgacagaggtgtgatgttaggccaggactttgaaaatttgcgcaactatcgtatagtggccgacaaattgacgccgagttgacagactgcctagcatttgagtgaattatgtgaggtaatgggctacactgaattggtagctcaaactgtcagtatttatgtatatgagtgtatattttcgcataatctcagaccaatctgaagatgaaatgggtatctgggaatggcgaaatcaaggcatcgatcgtgaagtttctcatctaagcccccatttggacgtgaatgtagacacgtcgaaataaagatttccgaattagaataatttgtttattgctttcgcctataaatacgacggatcgtaatttgtcgttttatcaaaatgtactttcattttataataacgctgcggacatctacatttttgaattgaaaaaaaattggtaattactctttctttttctccatattgaccatcatactcattgctgatccatgtagatttcccggacatgaagccatttacaattgaatatatcctgccgccgctgccgctttgcacccggtggagcttgcatgttggtttctacgcagaactgagccggttaggcagataatttccattgagaactgagccatgtgcaccttccccccaacacggtgagcgacggggcaacggagtgatccacatgggacttttaaacatcatccgtcggatggcgttgcgagagaagcagtcgatccgtgagatcagccgacgcaccgggcaggcgcgcaacacgatcgcaaagtatttgaacgcaggtacaatcgagccgacgttcacgcggaacgaccaagcaagctagctttaatgcggtagtttatcacagttaaattgctaacgcagtcaggcaccgtgtatgaaatctaacaatgcgctcatcgtcatcctcggcaccgtcaccctggatgctgtaggcataggcttggttatgccggtactgccgggcctcttgcgggatatcgtccattccgacagcatcgccagtcactatggcgtgctgctagcgctatatgcgttgatgcaatttctatgcgcacccgttctcggagcactgtccgaccgctttggccgccgcccagtcctgctcgcttcgctacttggagccactatcgactacgcgatcatggcgaccacacccgtcctgtggtccaacccctccgctgctatagtgcagtcggcttctgacgttcagtgcagccgtcttctgaaaacgacatgtcgcacaagtcctaagttacgcgacaggctgccgccctgcccttttcctggcgttttcttgtcgcgtgttttagtcgcataaagtagaatacttgcgactagaaccggagacattacgccatgaacaagagcgccgccgctggcctgctgggctatgcccgcgtcagcaccgacgaccaggacttgaccaaccaacgggccgaactgcacgcggccggctgcaccaagctgttttccgagaagatcaccggcaccaggcgcgaccgcccggagctggccaggatgcttgaccacctacgccctggcgacgttgtgacagtgaccaggctagaccgcctggcccgcagcacccgcgacctactggacattgccgagcgcatccaggaggccggcgcgggcctgcgtagcctggcagagccgtgggccgacaccaccacgccggccggccgcatggtgttgaccgtgttcgccggcattgccgagttcgagcgttccctaatcatcgaccgcacccggagcgggcgcgaggccgccaaggcccgaggcgtgaagtttggcccccgccctaccctcaccccggcacagatcgcgcacgcccgcgagctgatcgaccaggaaggccgcaccgtgaaagaggcggctgcactgcttggcgtgcatcgctcgaccctgtaccgcgcacttgagcgcagcgaggaagtgacgcccaccgaggccaggcggcgcggtgccttccgtgaggacgcattgaccgaggccgacgccctggcggccgccgagaatgaacgccaagaggaacaagcatgaaaccgcaccaggacggccaggacgaaccgtttttcattaccgaagagatcgaggcggagatgatcgcggccgggtacgtgttcgagccgcccgcgcacgtctcaaccgtgcggctgcatgaaatcctggccggtttgtctgatgccaagctggcggcctggccggccagcttggccgctgaagaaaccgagcgccgccgtctaaaaaggtgatgtgtatttgagtaaaacagcttgcgtcatgcggtcgctgcgtatatgatgcgatgagtaaataaacaaatacgcaagggaacgcatgaagttatcgctgtacttaaccagaaaggcgggtcaggcaagacgaccatcgcaacccatctagcccgcgccctgcaactcgccggggccgatgttctgttagtcgattccgatccccagggcagtgcccgcgattgggcggccgtgcgggaagatcaaccgctaaccgttgtcggcatcgaccgcccgacgattgaccgcgacgtgaaggccatcggccggcgcgacttcgtagtgatcgacggagcgccccaggcggcggacttggctgtgtccgcgatcaaggcagccgacttcgtgctgattccggtgcagccaagcccttacgacatatgggccaccgccgacctggtggagctggttaagcagcgcattgaggtcacggatggaaggctacaagcggcctttgtcgtgtcgcgggcgatcaaaggcacgcgcatcggcggtgaggttgccgaggcgctggccgggtacgagctgcccattcttgagtcccgtatcacgcagcgcgtgagctacccaggcactgccgccgccggcacaaccgttcttgaatcagaacccgagggcgacgctgcccgcgaggtccaggcgctggccgctgaaattaaatcaaaactcatttgagttaatgaggtaaagagaaaatgagcaaaagcacaaacacgctaagtgccggccgtccgagcgcacgcagcagcaaggctgcaacgttggccagcctggcagacacgccagccatgaagcgggtcaactttcagttgccggcggaggatcacaccaagctgaagatgtacgcggtacgccaaggcaagaccattaccgagctgctatctgaatacatcgcgcagctaccagagtaaatgagcaaatgaataaatgagtagatgaattttagcggctaaaggaggcggcatggaaaatcaagaacaaccaggcaccgacgccgtggaatgccccatgtgtggaggaacgggcggttggccaggcgtaagcggctgggttgtctgccggccctgcaatggcactggaacccccaagcccgaggaatcggcgtgagcggtcgcaaaccatccggcccggtacaaatcggcgcggcgctgggtgatgacctggtggagaagttgaaggccgcgcaggccgcccagcggcaacgcatcgaggcagaagcacgccccggtgaatcgtggcaagcggccgctgatcgaatccgcaaagaatcccggcaaccgccggcagccggtgcgccgtcgattaggaagccgcccaagggcgacgagcaaccagattttttcgttccgatgctctatgacgtgggcacccgcgatagtcgcagcatcatggacgtggccgttttccgtctgtcgaagcgtgaccgacgagctggcgaggtgatccgctacgagcttccagacgggcacgtagaggtttccgcagggccggccggcatggccagtgtgtgggattacgacctggtactgatggcggtttcccatctaaccgaatccatgaaccgataccgggaagggaagggagacaagcccggccgcgtgttccgtccacacgttgcggacgtactcaagttctgccggcgagccgatggcggaaagcagaaagacgacctggtagaaacctgcattcggttaaacaccacgcacgttgccatgcagcgtacgaagaaggccaagaacggccgcctggtgacggtatccgagggtgaagccttgattagccgctacaagatcgtaaagagcgaaaccgggcggccggagtacatcgagatcgagctagctgattggatgtaccgcgagatcacagaaggcaagaacccggacgtgctgacggttcaccccgattactttttgatcgatcccggcatcggccgttttctctaccgcctggcacgccgcgccgcaggcaaggcagaagccagatggttgttcaagacgatctacgaacgcagtggcagcgccggagagttcaagaagttctgtttcaccgtgcgcaagctgatcgggtcaaatgacctgccggagtacgatttgaaggaggaggcggggcaggctggcccgatcctagtcatgcgctaccgcaacctgatcgagggcgaagcatccgccggttcctaatgtacggagcagatgctagggcaaattgccctagcaggggaaaaaggtcgaaaaggtctctttcctgtggatagcacgtacattgggaacccaaagccgtacattgggaaccggaacccgtacattgggaacccaaagccgtacattgggaaccggtcacacatgtaagtgactgatataaaagagaaaaaaggcgatttttccgcctaaaactctttaaaacttattaaaactcttaaaacccgcctggcctgtgcataactgtctggccagcgcacagccgaagagctgcaaaaagcgcctacccttcggtcgctgcgctccctacgccccgccgcttcgcgtcggcctatcgcggccgctggccgctcaaaaatggctggcctacggccaggcaatctaccagggcgcggacaagccgcgccgtcgccactcgaccgccggcgcccacatcaaggcaccctgcctcgcgcgtttcggtgatgacggtgaaaacctctgacacatgcagctcccggagacggtcacagcttgtctgtaagcggatgccgggagcagacaagcccgtcagggcgcgtcagcgggtgttggcgggtgtcggggcgcagccatgacccagtcacgtagcgatagcggagtgtatactggcttaactatgcggcatcagagcagattgtactgagagtgcaccatatgcggtgtgaaataccgcacagatgcgtaaggagaaaataccgcatcaggcgctcttccgcttcctcgctcactgactcgctgcgctcggtcgttcggctgcggcgagcggtatcagctcactcaaaggcggtaatacggttatccacagaatcaggggataacgcaggaaagaacatgtgagcaaaaggccagcaaaaggccaggaaccgtaaaaaggccgcgttgctggcgtttttccataggctccgcccccctgacgagcatcacaaaaatcgacgctcaagtcagaggtggcgaaacccgacaggactataaagataccaggcgtttccccctggaagctccctcgtgcgctctcctgttccgaccctgccgcttaccggatacctgtccgcctttctcccttcgggaagcgtggcgctttctcatagctcacgctgtaggtatctcagttcggtgtaggtcgttcgctccaagctgggctgtgtgcacgaaccccccgttcagcccgaccgctgcgccttatccggtaactatcgtcttgagtccaacccggtaagacacgacttatcgccactggcagcagccactggtaacaggattagcagagcgaggtatgtaggcggtgctacagagttcttgaagtggtggcctaactacggctacactagaaggacagtatttggtatctgcgctctgctgaagccagttaccttcggaaaaagagttggtagctcttgatccggcaaacaaaccaccgctggtagcggtggtttttttgtttgcaagcagcagattacgcgcagaaaaaaaggatctcaagaagatcctttgatcttttctacggggtctgacgctcagtggaacgaaaactcacgttaagggattttggtcatgagattatcaaaaaggatcttcacctagatccttttaaattaaaaatgaagttttaaatcaatctaaagtatatatgagtaaacttggtctgacagttaccaatgcttaatcagtgaggcacctatctcagcgatctgtctatttcgttcatccatagttgcctgactccccgtcgtgtagataactacgatacgggagggcttaccatctggccccagtgctgcaatgataccgcgagacccacgctcaccggctccagatttatcagcaataaaccagccagccggaagggccgagcgcagaagtggtcctgcaactttatccgcctccatccagtctattaattgttgccgggaagctagagtaagtagttcgccagttaatagtttgcgcaacgttgttgccattgctacaggcatcgtggtgtcacgctcgtcgtttggtatggcttcattcagctccggttcccaacgatcaaggcgagttacatgatcccccatgttgtgcaaaaaagcggttagctccttcggtcctccgatcgttgtcagaagtaagttggccgcagtgttatcactcatggttatggcagcactgcataattctcttactgtcatgccatccgtaagatgcttttctgtgactggtgagtactcaaccaagtcattctgagaatagtgtatgcggcgaccgagttgctcttgcccggcgtcaacacgggataataccgcgccacatagcagaactttaaaagtgctcatcattggaaaagacctgcaggggggggggggcgctgaggtctgcctcgtgaagaaggtgttgctgactcataccaggcctgaatcgccccatcatccagccagaaagtgagggagccacggttgatgagagctttgttgtaggtggaccagttggtgattttgaacttttgctttgccacggaacggtctgcgttgtcgggaagatgcgtgatctgatccttcaactcagcaaaagttcgatttattcaacaaagccgccgtcccgtcaagtcagcgtaatgctctgccagtgttacaaccaattaaccaattctgattagaaaaactcatcgagcatcaaatgaaactgcaatttattcatatcaggattatcaataccatatttttgaaaaagccgtttctgtaatgaaggagaaaactcaccgaggcagttccataggatggcaagatcctggtatcggtctgcgattccgactcgtccaacatcaatacaacctattaatttcccctcgtcaaaaataaggttatcaagtgagaaatcaccatgagtgacgactgaatccggtgagaatggcaaaagcttatgcatttctttccagacttgttcaacaggccagccattacgctcgtcatcaaaatcactcgcatcaaccaaaccgttattcattcgtgattgcgcctgagcgagacgaaatacgcgatcgctgttaaaaggacaattacaaacaggaatcgaatgcaaccggcgcaggaacactgccagcgcatcaacaatattttcacctgaatcaggatattcttctaatacctggaatgctgttttcccggggatcgcagtggtgagtaaccatgcatcatcaggagtacggataaaatgcttgatggtcggaagaggcataaattccgtcagccagtttagtctgaccatctcatctgtaacatcattggcaacgctacctttgccatgtttcagaaacaactctggcgcatcgggcttcccatacaatcgatagattgtcgcacctgattgcccgacattatcgcgagcccatttatacccatataaatcagcatccatgttggaatttaatcgcggcctcgagcaagacgtttcccgttgaatatggctcataacaccccttgtattactgtttatgtaagcagacagttttattgttcatgatgatatatttttatcttgtgcaatgtaacatcagagattttgagacacaacgtggctttcccccccccccctgcaggtcaattcggtcgatatggctattacgaagaaggctcgtgcgcggagtcccgtgaactttcccacgcaacaagtgaaccgcaccgggtttgccggaggccatttcgttaaaatgcgcagccatggctgcttcgtccagcatggcgtaatactgatcctcgtcttcggctggcggtatattgccgatgggcttcaaaagccgccgtggttgaaccagtctatccattccaaggtagcgaactcgaccgcttcgaagctcctccatggtccacgccgatgaatgacctcggccttgtaaagaccgttgatcgcttctgcgagggcgttgtcgtgctgtcgccgacgcttccgatagatggctcgatacctgcttctgccaaccgctcggaatagcgaaaggacacgtattgaacaccgcgatccgagtgatgcactaggccgccatgagcgggacgccgatcatgatgagcctcctcgagggcatcgaggacaaagcctgcatgtgctgtccggctcgcccgccatccgacaatgcgacgggcgaagacgtcgatcacgaaggccacgtagacgaagccctcccaagtggcgacataagtacggacatgcgcaaaggctttcccggtttgtcgctgatggtgcaagagacgctgaagcgcgatccgatgcgcaggcatctgttcgtcttccgcggtcgtggcggtggcctgatcaaggtcactcgccgaagagctgcatgattggctcgaaaccgagcgggggaaattgtcgcgcagttctcccgtcgccgaggcgataaattacatgctcaagcgatgggatggcattacgtcattcctcgatgacggcccgatttgcctgacgaacaatgctgccgaacgaacgctcagaggctatgtactcggcaggaagtcatggctgtttgccggatcggatcgttgtgctgaacgtgcggcgttcatggcgacactgatcatgagcgccaagctcaataacatcgatccgcaggcctggcttgccgacgtccgcgccgaccttgcggacgctccgatcagcaggcttgagcaacagctgccgtggaactggacatccaagacactgagtgctcaggcggcctgacctgcggccttcaccggatacttaccccattatcgcagattgcgatgaagcatcagcgtcattcagcaatcttgccaaagtatgcaggctcgcgagaatcgacgtgcgaaaccggctggttgcgccaaagatccgcttgcggagcggtcgaacattcatgctgggacttcaagaggtcgagtagaggaagaaccggaaaggttgcaccggaaaatatgcgttcctttggagagcgcctcatggacgtgaacaaatcgcccggaccaaggatgccacggatacaaaagctcgcgaagctcggtcccgtgggtgttctgtcgtctcgttgtacaacgaaatccattcccattccgcgctcaagatggcttcccctcggcagttcatcagggctaaatcaatctagccgacttgtccggtgaaatgggctgcactccaacagaaacaatcaaacaaacatacacagcgacttattcacacgagctcaaattacaacggtatatatcctgccagtcagcatcatcacaccaaaagttaggcccgaatagtttgaaattagaaagctcgcaattgaggtctacaggccaaattcgctcttagccgtacaatattactcaccggtgcgatgccccccatcgtaggtgaaggtggaaattaatgatccatcttgagaccacaggcccacaacagctaccagtttcctcaagggtccaccaaaaacgtaagcgcttacgtacatggtcgataagaaaaggcaatttgtagatgttaacatccaacgtcgctttcagggatcgatccaatacgcaaaccgcctctccccgcgcgttggccgattcattaatgcagctggcacgacaggtttcccgactggaaagcgggcagtgagcgcaacgcaattaatgtgagttagctcactcattaggcaccccaggctttacactttatgcttccggctcgtatgttgtgtggaattgtgagcggataacaatttcacacaggaaacagctatgaccatgattacgccaagcttgcatgcctgcaggtcgactctagaggatctgg

SEQ ID NO: 35 - DNA, 3527 bp, Glycine max
tagcctaagtacgtactcaaaatgccaacaaataaaaaaaaagttgctttaataatgccaaaacaaattaataaaacacttacaacaccggattttttttaattaaaatgtgccatttaggataaatagttaatatttttaataattatttaaaaagccgtatctactaaaatgatttttatttggttgaaaatattaatatgtttaaatcaacacaatctatcaaaattaaactaaaaaaaaaataagtgtacgtggttaacattagtacagtaatataagaggaaaatgagaaattaagaaattgaaagcgagtctaatttttaaattatgaacctgcatatataaaaggaaagaaagaatccaggaagaaaagaaatgaaaccatgcatggtcccctcgtcatcacgagtttctgccatttgcaatagaaacactgaaacacctttctctttgtcacttaattgagatgccgaagccacctcacaccatgaacttcatgaggtgtagcacccaaggcttccatagccatgcatactgaagaatgtctcaagctcagcaccctacttctgtgacgttgtccctcattcaccttcctctcttccctataaataaccacgcctcaggttctccgcttcacaactcaaacattctcctccattggtccttaaacactcatcagtcatcaccatggccaagctagttttttccctttgttttctgcttttcagtggctgctgcttcgctttcagttccagagagcagcctcagcaaaacgagtgccagatccaaaaactcaatgccctcaaaccggataaccgtatagagtcagaaggagggctcattgagacatggaaccctaacaacaagccattccagtgtgccggtgttgccctctctcgctgcaccctcaaccgcaacgcccttcgtagaccttcctacaccaacggtccccaggaaatctacatccaacaaggtccatcttgtccaaacttcacatataaatatataatagacttaaatatgtttaagggtttgataaatgagggaattttattttagatttttaataattttttttgttttgagtttttatatattaaaatttttgttttgatttcttccatatgacgtaacataatcatatcattgataatgttgggttcctaatttttgtttgtttgttgttttgtaatatgaataggtaagggtatttttggcatgatatacccgggttgtcctagcacatttgaagagcctcaacaacctcaacaaagaggacaaagcagcagaccacaagaccgtcaccagaagatctataacttcagagagggtgatttgatcgcagtgcctactggtgttgcatggtggatgtacaacaatgaagacactcctgttgttgccgtttctattattgacaccaacagcttggagaaccagctcgaccagatgcctagggtgagccacatagcaatattagatattataattctttaaaggtttaaatatcattttagttcgtggagttgcactttctaatttagtacctatagattaaaatatgccaattgaatccttatagttgtgtttttttatccaatttggttcttgtcttgaaataaatggacaatattgtagctgataaaaaaaggaaactggactacattgtaacgttaagattagaattcttaagttctaatactagctggttacagattgacaactatttgttttgacaattcttggcagagattctatcttgctgggaaccaagagcaagagtttctaaaatatcagcaagagcaaggaggtcatcaaagccagaaaggaaagcatcagcaagaagaagaaaacgaaggaggcagcatattgagtggcttcaccctggaattcttggaacatgcattcagcgtggacaagcagatagcgaaaaacctacaaggagagaacgaaggggaagacaagggagccattgtgacagtgaaaggaggtctgagcgtgataaaaccacccacggacgagcagcaacaaagaccccaggaagaggaagaagaagaagaggatgagaagccacagtgcaagggtaaagacaaacactgccaacgcccccgaggaagccaaagcaaaagcagaagaaatggcattgacgagaccatatgcaccatgagacttcgccacaacattggccagacttcatcacctgacatctacaaccctcaagccggtagcgtcacaaccgccaccagccttgacttcccagccctctcgtggctcagactcagtgctgagtttggatctctccgcaaggtacgtacatcattcatcaaagatcaacatacatttatacattaaactaatatttgttgccaaatatttattaattttattgataattaatttttttagaaaatttgtttgatcacttttaatggagtctttcatcttaattacattatttatacttagactaatgatttattgattaataataatcttagatacactataaaatgtgtgacggagttatcttaacacttgcatggattctatcttttctgtctttatatatagaaatagagagaaaaaaaaagaaaagattgatgaaaaaagcaaaacaaaaaatagtattattataaaaatattggatgaatttgttgtgactcttgcatgcattgatgtacgatgcagaatgcaatgttcgtgccacactacaacctgaacgcgaacagcataatatacgcattgaatggacgggcattgatacaagtggtgaattgcaacggtgagagagtgtttgatggagagctgcaagagggacgggtgctgatcgtgccacaaaactttgtggtggctgcaagatcacagagtgacaacttcgagtatgtgtcattcaagaccaatgatacacccatgatcggcactcttgcaggggcaaactcattgttgaacgcattaccagaggaagtgattcagcacactttcaacctaaaaagccagcaggccaggcagataaagaacaacaaccctttcaagttcctggttccacctcaggagtctcagaagagagctgtggcttagagccctttttgtatgtgctaccccacttttgtctttttggcaatagtgctagcaaccaataaataataataataataatgaataagaaaacaaaggctttagcttgccttttgttcactgtaaaataataatgtaagtactctctataatgagtcacgaaacttttgcgggaataaaaggagaaattccaatgagttttctgtcaaatcttcttttgtctctctctctctctcttttttttttctttcttctgagcttcttgcaaaacaaaaggcaaacaataacgattggtccaatgatagttagcttgatcgatgatatctttaggaagtgttggcaggacaggacatgatgtagaagactaaaattgaaagtattgcagacccaatagttgaagattaactttaagaatgaagacgtcttatcaggttcttcatgacttggagctc

SEQ ID NO: 36 - DNA, 690 bp, Glycine max
tagcctaagtacgtactcaaaatgccaacaaataaaaaaaaagttgctttaataatgccaaaacaaattaataaaacacttacaacaccggattttttttaattaaaatgtgccatttaggataaatagttaatatttttaataattatttaaaaagccgtatctactaaaatgatttttatttggttgaaaatattaatatgtttaaatcaacacaatctatcaaaattaaactaaaaaaaaaataagtgtacgtggttaacattagtacagtaatataagaggaaaatgagaaattaagaaattgaaagcgagtctaatttttaaattatgaacctgcatatataaaaggaaagaaagaatccaggaagaaaagaaatgaaaccatgcatggtcccctcgtcatcacgagtttctgccatttgcaatagaaacactgaaacacctttctctttgtcacttaattgagatgccgaagccacctcacaccatgaacttcatgaggtgtagcacccaaggcttccatagccatgcatactgaagaatgtctcaagctcagcaccctacttctgtgacgttgtccctcattcaccttcctctcttccctataaataaccacgcctcaggttctccgcttcacaactcaaacattctcctccattggtccttaaacactcatcagtcatcacc

SEQ ID NO: 37 - DNA, 36 bp, Artificial Sequence
  Primer oGy1-1
cgcggatcctagcctaagtacgtactcaaaatgcca

SEQ ID NO: 38 - DNA, 39 bp, Artificial Sequence
  Primer oGy1-2
gaattcccatggggtgatgactgatgagtgtttaaggac

SEQ ID NO: 39 - DNA, 6660 bp, Artificial Sequence
  Plasmid pZBL114
cggtgcgggcctcttcgctattacgccagctggcgaaagggggatgtgctgcaaggcgattaagttgggtaacgccagggttttcccagtcacgacgttgtaaaacgacggccagtgccaagctgacttggtcagcggccgctctagaactagtggatcctagcctaagtacgtactcaaaatgccaacaaataaaaaaaaagttgctttaataatgccaaaacaaattaataaaacacttacaacaccggattttttttaattaaaatgtgccatttaggataaatagttaatatttttaataattatttaaaaagccgtatctactaaaatgatttttatttggttgaaaatattaatatgtttaaatcaacacaatctatcaaaattaaactaaaaaaaaaataagtgtacgtggttaacattagtacagtaatataagaggaaaatgagaaattaagaaattgaaagcgagtctaatttttaaattatgaacctgcatatataaaaggaaagaaagaatccaggaagaaaagaaatgaaaccatgcatggtcccctcgtcatcacgagtttctgccatttgcaatagaaacactgaaacacctttctctttgtcacttaattgagatgccgaagccacctcacaccatgaacttcatgaggtgtagcacccaaggcttccatagccatgcatactgaagaatgtctcaagctcagcaccctacttctgtgacgtgtccctcattcaccttcctctcttccctataaataaccacgcctcaggttctccgcttcacaactcaaacattctctccattggtccttaaacactcatcagtcatcaccatggtacgtcctgtagaaaccccaacccgtgaaatcaaaaaactcgacggcctgtgggcattcagtctggatcgcgaaaactgtggaattgatcagcgttggtgggaaagcgcgttacaagaaagccgggcaattgctgtgccaggcagttttaacgatcagttcgccgatgcagatattcgtaattatgcgggcaacgtctggtatcagcgcgaagtctttataccgaaaggttgggcaggccagcgtatcgtgctgcgtttcgatgcggtcactcattacggcaaagtgtgggtcaataatcaggaagtgatggagcatcagggcggctatacgccatttgaagccgatgtcacgccgtatgttattgccgggaaaagtgtacgtatcaccgtttgtgtgaacaacgaactgaactggcagactatcccgccgggaatggtgattaccgacgaaaacggcaagaaaaagcagtcttacttccatgatttctttaactatgccggaatccatcgcagcgtaatgctctacaccacgccgaacacctgggtggacgatatcaccgtggtgacgcatgtcgcgcaagactgtaaccacgcgtctgttgactggcaggtggtggccaatggtgatgtcagcgttgaactgcgtgatgcggatcaacaggtggttgcaactggacaaggcactagcgggactttgcaagtggtgaatccgcacctctggcaaccgggtgaaggttatctctatgaactgtgcgtcacagccaaaagccagacagagtgtgatatctacccgcttcgcgtcggcatccggtcagtggcagtgaagggccaacagttcctgattaaccacaaaccgttctactttactggctttggtcgtcatgaagatgcggacttacgtggcaaaggattcgataacgtgctgatggtgcacgaccacgcattaatggactggattggggccaactcctaccgtacctcgcattacccttacgctgaagagatgctcgactgggcagatgaacatggcatcgtggtgattgatgaaactgctgctgtcggctttaacctctctttaggcattggtttcgaagcgggcaacaagccgaaagaactgtacagcgaagaggcagtcaacggggaaactcagcaagcgcacttacaggcgattaaagagctgatagcgcgtgacaaaaaccacccaagcgtggtgatgtggagtattgccaacgaaccggatacccgtccgcaagtgcacgggaatatttcgccactggcggaagcaacgcgtaaactcgacccgacgcgtccgatcacctgcgtcaatgtaatgttctgcgacgctcacaccgataccatcagcgatctctttgatgtgctgtgcctgaaccgttattacggatggtatgtccaaagcggcgatttggaaacggcagagaaggtactggaaaaagaacttctggcctggcaggagaaactgcatcagccgattatcatcaccgaatacggcgtggatacgttagccgggctgcactcaatgtacaccgacatgtggagtgaagagtatcagtgtgcatggctggatatgtatcaccgcgtctttgatcgcgtcagcgccgtcgtcggtgaacaggtatggaatttcgccgattttgcgacctcgcaaggcatattgcgcgttggcggtaacaagaaagggatcttcactcgcgaccgcaaaccgaagtcggcggcttttctgctgcaaaaacgctggactggcatgaacttcggtgaaaaaccgcagcagggaggcaaacaatgaatcaacaactctcctggcgcaccatcgtcggctacagcctcggtggggaattccccgggggtacctctagacatggccacgtgcatgaagtatgaactaaaatgcatgtaggtgtaagagctcatggagagcatggaatattgtatccgaccatgtaacagtataataactgagctccatctcacttcttctatgaataaacaaaggatgttatgatatattaacactctatctatgcaccttattgttctatgataaatttcctcttattattataaatcatctgaatcgtgacggcttatggaatgcttcaaatagtacaaaaacaaatgtgtactataagactttctaaacaattctaactttagcattgtgaacgagacataagtgttaagaagacataacaattataatggaagaagtttgtctccatttatatattatatattacccacttatgtattatattaggatgttaaggagacataacaattataaagagagaagtttgtatccatttatatattatatactacccatttatatattatacttatccacttatttaatgtctttataaggtttgatccatgatatttctaatattttagttgatatgtatatgaaagggtactatttgaactctcttactctgtataaaggttggatcatccttaaagtgggtctatttaattttattgcttcttacagataaaaaaaaaattatgagttggtttgataaaatattgaaggatttaaaataataataaataataaataacatataatatatgtatataaatttattataatataacatttatctataaaaaagtaaatattgtcataaatctatacaatcgtttagccttgctggacgactctcaattatttaaacgagagtaaacatatttgactttttggttatttaacaaattattatttaacactatatgaaattttttttttttatcagcaaagaaataaaattaaattaagaaggacaatggtgtgtcccaatccttatacaaccaacttccacaagaaagtcaagtcagagacaacaaaaaaacaagcaaaggaaattttttaatttgagttgtcttgtttgctgcataatttatgcagtaaaacactacacataacccttttagcagtagagcaatggttgaccgtgtgcttagcttcttttattttatttttttatcagcaaagaataaataaaataaaatgagacacttcagggatgtttcaacaagctttgctctagactggaattcgtcgacgagctccctatagtgagtcgtattagaggccgacttggccaaattcgtaatcatggtcatagctgtttcctgtgtgaaattgttatccgctcacaattccacacaacatacgagccggaagcataaagtgtaaagcctggggtgcctaatgagtgagctaactcacattaattgcgttgcgctcactgcccgctttccagtcgggaaacctgtcgtgccagctgcattaatgaatcggccaacgcgcggggagaggcggtttgcgtattgggcgctcttccgcttcctcgctcactgactcgctgcgctcggtcgttcggctgcggcgagcggtatcagctcactcaaaggcggtaatacggttatccacagaatcaggggataacgcaggaaagaacatgtgagcaaaaggccagcaaaaggccaggaaccgtaaaaaggccgcgttgctggcgtttttccataggctccgcccccctgacgagcatcacaaaaatcgacgctcaagtcagaggtggcgaaacccgacaggactataaagataccaggcgtttccccctggaagctccctcgtgcgctctcctgttccgaccctgccgcttaccggatacctgtccgcctttctcccttcgggaagcgtggcgctttctcatagctcacgctgtaggtatctcagttcggtgtaggtcgttcgctccaagctgggctgtgtgcacgaaccccccgttcagcccgaccgctgcgccttatccggtaactatcgtcttgagtccaacccggtaagacacgacttatcgccactggcagcagccactggtaacaggattagcagagcgaggtatgtaggcggtgctacagagttcttgaagtggtggcctaactacggctacactagaaggacagtatttggtatctgcgctctgctgaagccagttaccttcggaaaaagagttggtagctcttgatccggcaaacaaaccaccgctggtagcggtggtttttttgtttgcaagcagcagattacgcgcagaaaaaaaggatctcaagaagatcctttgatcttttctacggggtctgacgctcagtggaacgaaaactcacgttaagggattttggtcatgagattatcaaaaaggatcttcacctagatccttttaaattaaaaatgaagttttaaatcaatctaaagtatatatgagtaaacttggtctgacagttaccaatgcttaatcagtgaggcacctatctcagcgatctgtctatttcgttcatccatagttgcctgactccccgtcgtgtagataactacgatacgggagggcttaccatctggccccagtgctgcaatgataccgcgagacccacgctcaccggctccagatttatcagcaataaaccagccagccggaagggccgagcgcagaagtggtcctgcaactttatccgcctccatccagtctattaattgttgccgggaagctagagtaagtagttcgccagttaatagtttgcgcaacgttgttgccattgctacaggcatcgtggtgtcacgctcgtcgtttggtatggcttcattcagctccggttcccaacgatcaaggcgagttacatgatcccccatgttgtgcaaaaaagcggttagctccttcggtcctccgatcgttgtcagaagtaagttggccgcagtgttatcactcatggttatggcagcactgcataattctcttactgtcatgccatccgtaagatgcttttctgtgactggtgagtactcaaccaagtcattctgagaatagtgtatgcggcgaccgagttgctcttgcccggcgtcaatacgggataataccgcgccacatagcagaactttaaaagtgctcatcattggaaaacgttcttcggggcgaaaactctcaaggatcttaccgctgttgagatccagttcgatgtaacccactcgtgcacccaactgatcttcagcatcttttactttcaccagcgtttctgggtgagcaaaaacaggaaggcaaaatgccgcaaaaaagggaataagggcgacacggaaatgttgaatactcatactcttcctttttcaatattattgaagcatttatcagggttattgtctcatgagcggatacatatttgaatgtatttagaaaaataaacaaataggggttccgcgcacatttccccgaaaagtgccacctgacgcgccctgtagcggcgcattaagcgcggcgggtgtggtggttacgcgcagcgtgaccgctacacttgccagcgccctagcgcccgctcctttcgctttcttcccttcctttctcgccacgttcgccggctttccccgtcaagctctaaatcggggcatccctttagggttccgatttagtgctttacggcacctcgaccccaaaaaacttgattagggtgatggttcacgtagtgggccatcgccctgatagacggtttttcgccctttgacgttggagtccacgttctttaatagtggactcttgttccaaactggaacaacactcaaccctatctcggtctattcttttgatttataagggattttgccgatttcggcctattggttaaaaaatgagctgatttaacaaaaatttaacgcgaattttaacaaaatattaacaaaatattaacgtttacaatttcccattcgccattcaggctgcgcaactgttgggaagggcgat

SEQ ID NO: 40 - DNA, 1437 bp, Artificial Sequence
  GM GY1 gene
atgggttccagagagcagcctcagcaaaacgagtgccagatccaaaaactcaatgccctcaaaccggataaccgtatagagtcagaaggagggctcattgagacatggaaccctaacaacaagccattccagtgtgccggtgttgccctctctcgctgcaccctcaaccgcaacgcccttcgtagaccttcctacaccaacggtccccaggaaatctacatccaacaaggtaagggtatttttggcatgatatacccgggttgtcctagcacatttgaagagcctcaacaacctcaacaaagaggacaaagcagcagaccacaagaccgtcaccagaagatctataacttcagagagggtgatttgatcgcagtgcctactggtgttgcatggtggatgtacaacaatgaagacactcctgttgttgccgtttctattattgacaccaacagcttggagaaccagctcgaccagatgcctaggagattctatcttgctgggaaccaagagcaagagtttctaaaatatcagcaagagcaaggaggtcatcaaagccagaaaggaaagcatcagcaagaagaagaaaacgaaggaggcagcatattgagtggcttcaccctggaattcttggaacatgcattcagcgtggacaagcagatagcgaaaaacctacaaggagagaacgaaggggaagacaagggagccattgtgacagtgaaaggaggtctgagcgtgttaaaaccacccacggacgagcagcaacaaagaccccaggaagaggaagaagaagaagaggatgagaagccacagtgcaagggtaaagacaaacactgccaacgcccccgaggaagccaaagcaaaagcagaagaaatggcattgacgagaccatatgcaccatgagacttcgccacaacattggccagacttcatcacctgacatctacaaccctcaagccggtagcgtcacaaccgccaccagccttgacttcccagccctctcgtggctcagactcagtgctgagtttggatctctccgcaagaatgcaatgttcgtgccacactacaacctgaacgcgaacagcataatatacgcattgaatggacgggcattgatacaagtggtgaattgcaacggtgagagagtgtttgatggagagctgcaagagggacgggtgctgatcgtgccacaaaactttgtggtggctgcaagatcacagagtgacaacttcgagtatgtgtcattcaagaccaatgatacacccatgatcggcactcttgcaggggcaaactcattgttgaacgcattaccagaggaagtgattcagcacactttcaacctaaaaagccagcaggccaggcagataaagaacaacaaccctttcaagttcctggttccacctcaggagtctcagaagagagctgtggcttagggtacc

SEQ ID NO: 41 - DNA, 204 bp, Artificial Sequence
  synthetic BHL8 gene
atggctaagattaagtgcacgtggcctgagctggtgggcaagaccgtggagaaagccaagaagatgatcatgaaggacaagccagaggcgaagatcatggttctgccagttgggaccaaagtgaccggtgaatggaagatggatcgcgtccgcctctgggtcgataagaaggacaagatcgccaagactccgaagtgcggctag

SEQ ID NO: 42 - DNA, 1701 bp, Artificial Sequence
  GY1-BHL8 fusion product
atggccaagctagttttttccctttgttttctgcttttcagtggctgctgcttcgctttcagttccagagagcagcctcagcaaaacgagtgccagatccaaaaactcaatgccctcaaaccggataaccgtatagagtcagaaggagggctcattgagacatggaaccctaacaacaagccattccagtgtgccggtgttgccctctctcgctgcaccctcaaccgcaacgcccttcgtagaccttcctacaccaacggtccccaggaaatctacatccaacaaggtaagggtatttttggcatgatatacccgggttgtcctagcacatttgaagagcctcagcaacctcaacaaagaggacaaagcagcagaccacaagaccgtcaccagaagatctataacttcagagagggtgatttgatcgcagtgcctactggtgttgcatggtggatgtacaacaatgaagacactcctgttgttgccgtttctattattgacaccaacagcttggagaaccagctcgaccagatgcctaggagattctatcttgctgggaaccaagagcaagagtttctaaaatatcagcaagagcaaggaggtcatcaaagccagaaaggaaagcatcagcaagaagaagaaaacgaaggaggcagcatattgagtggcttcaccctggaattcttggaacatgcattcagcgtggacaagcagatagcgaaaaacctacaaggagagaacgaaggggaagacaagggagccattgtgacagtgaaaggaggtctgagcgtgttaaaaccacccacggacgagcagcaacaaagaccccaggaagaggaagaagaagaagaggatgagaagccacagtgcaagggtaaagacaaacactgccaacgcccccgaggaagccaaagcaaaagcagaagaaatggcattgacgagaccatatgcaccatgagacttcgccacaacattggccagacttcatcacctgacatctacaaccctcaagccggtagcgtcacaaccgccaccagccttgacttcccagccctctcgtggctcagactcagtgctgagtttggatctctccgcaagaatgcaatgttcgtgccacactacaacctgaacgcgaacagcataatatacgcattgaatggacgggcattgatacaagtggtgaattgcaacggtgagagagtgtttgatggagagctgcaagagggacgggtgctgatcgtgccacaaaactttgtggtggctgcaagatcacagagtgacaacttcgagtatgtgtcattcaagaccaatgatacacccatgatcggcactcttgcaggggcaaactcattgttgaacgcattaccagaggaagtgattcagcacactttcaacctaaaaagccagcaggccaggcagataaagaacaacaaccctttcaagttcctggttccacctcaggagtctcagaagagagctgtggctggtggtggatctatggctaagattaagtgcacgtggcctgagctggtgggcaagaccgtggagaaagccaagaagatgatcatgaaggacaagccagaggcgaagatcatggttctgccagttgggaccaaagtgaccggtgaatggaagatggatcgcgtccgcctctgggtcgataagaaggacaagatcgccaagactccgaagtgcggctag

SEQ ID NO: 43 - DNA, 6493 bp, Artificial Sequence
  Plasmid pZBL133
cggtgcgggcctcttcgctattacgccagctggcgaaagggggatgtgctgcaaggcgattaagttgggtaacgccagggttttcccagtcacgacgttgtaaaacgacggccagtgccaagctgacttggtcagcggccgctctagaactagtggatcctagcctaagtacgtactcaaaatgccaacaaataaaaaaaaagttgctttaataatgccaaaacaaattaataaaacacttacaacaccggattttttttaattaaaatgtgccatttaggataaatagttaatatttttaataattatttaaaaagccgtatctactaaaatgatttttatttggttgaaaatattaatatgtttaaatcaacacaatctatcaaaattaaactaaaaaaaaaataagtgtacgtggttaacattagtacagtaatataagaggaaaatgagaaattaagaaattgaaagcgagtctaatttttaaattatgaacctgcatatataaaaggaaagaaagaatccaggaagaaaagaaatgaaaccatgcatggtcccctcgtcatcacgagtttctgccatttgcaatagaaacactgaaacacctttctctttgtcacttaattgagatgccgaagccacctcacaccatgaacttcatgaggtgtagcacccaaggcttccatagccatgcatactgaagaatgtctcaagctcagcaccctacttctgtgacgtgtccctcattcaccttcctctcttccctataaataaccacgcctcaggttctccgcttcacaactcaaacattctctccattggtccttaaacactcatcagtcatcaccatggccaagctagttttttccctttgttttctgcttttcagtggctgctgcttcgctttcagttccagagagcagcctcagcaaaacgagtgccagatccaaaaactcaatgccctcaaaccggataaccgtatagagtcagaaggagggctcattgagacatggaaccctaacaacaagccattccagtgtgccggtgttgccctctctcgctgcaccctcaaccgcaacgcccttcgtagaccttcctacaccaacggtccccaggaaatctacatccaacaaggtaagggtatttttggcatgatatacccgggttgtcctagcacatttgaagagcctcagcaacctcaacaaagaggacaaagcagcagaccacaagaccgtcaccagaagatctataacttcagagagggtgatttgatcgcagtgcctactggtgttgcatggtggatgtacaacaatgaagacactcctgttgttgccgtttctattattgacaccaacagcttggagaaccagctcgaccagatgcctaggagattctatcttgctgggaaccaagagcaagagtttctaaaatatcagcaagagcaaggaggtcatcaaagccagaaaggaaagcatcagcaagaagaagaaaacgaaggaggcagcatattgagtggcttcaccctggaattcttggaacatgcattcagcgtggacaagcagatagcgaaaaacctacaaggagagaacgaaggggaagacaagggagccattgtgacagtgaaaggaggtctgagcgtgttaaaaccacccacggacgagcagcaacaaagaccccaggaagaggaagaagaagaagaggatgagaagccacagtgcaagggtaaagacaaacactgccaacgcccccgaggaagccaaagcaaaagcagaagaaatggcattgacgagaccatatgcaccatgagacttcgccacaacattggccagacttcatcacctgacatctacaaccctcaagccggtagcgtcacaaccgccaccagccttgacttcccagccctctcgtggctcagactcagtgctgagtttggatctctccgcaagaatgcaatgttcgtgccacactacaacctgaacgcgaacagcataatatacgcattgaatggacgggcattgatacaagtggtgaattgcaacggtgagagagtgtttgatggagagctgcaagagggacgggtgctgatcgtgccacaaaactttgtggtggctgcaagatcacagagtgacaacttcgagtatgtgtcattcaagaccaatgatacacccatgatcggcactcttgcaggggcaaactcattgttgaacgcattaccagaggaagtgattcagcacactttcaacctaaaaagccagcaggccaggcagataaagaacaacaaccctttcaagttcctggttccacctcaggagtctcagaagagagctgtggctggtggtggatctatggctaagattaagtgcacgtggcctgagctggtgggcaagaccgtggagaaagccaagaagatgatcatgaaggacaagccagaggcgaagatcatggttctgccagttgggaccaaagtgaccggtgaatggaagatggatcgcgtccgcctctgggtcgataagaaggacaagatcgccaagactccgaagtgcggctagggtacctctagacatggccacgtgcatgaagtatgaactaaaatgcatgtaggtgtaagagctcatggagagcatggaatattgtatccgaccatgtaacagtataataactgagctccatctcacttcttctatgaataaacaaaggatgttatgatatattaacactctatctatgcaccttattgttctatgataaatttcctcttattattataaatcatctgaatcgtgacggcttatggaatgcttcaaatagtacaaaaacaaatgtgtactataagactttctaaacaattctaactttagcattgtgaacgagacataagtgttaagaagacataacaattataatggaagaagtttgtctccatttatatattatatattacccacttatgtattatattaggatgttaaggagacataacaattataaagagagaagtttgtatccatttatatattatatactacccatttatatattatacttatccacttatttaatgtctttataaggtttgatccatgatatttctaatattttagttgatatgtatatgaaagggtactatttgaactctcttactctgtataaaggttggatcatccttaaagtgggtctatttaattttattgcttcttacagataaaaaaaaaattatgagttggtttgataaaatattgaaggatttaaaataataataaataataaataacatataatatatgtatataaatttattataatataacatttatctataaaaaagtaaatattgtcataaatctatacaatcgtttagccttgctggacgactctcaattatttaaacgagagtaaacatatttgactttttggttatttaacaaattattatttaacactatatgaaattttttttttttatcagcaaagaaataaaattaaattaagaaggacaatggtgtgtcccaatccttatacaaccaacttccacaagaaagtcaagtcagagacaacaaaaaaacaagcaaaggaaattttttaatttgagttgtcttgtttgctgcataatttatgcagtaaaacactacacataacccttttagcagtagagcaatggttgaccgtgtgcttagcttcttttattttatttttttatcagcaaagaataaataaaataaaatgagacacttcagggatgtttcaacaagctttgctctagactggaattcgtcgacgagctccctatagtgagtcgtattagaggccgacttggccaaattcgtaatcatggtcatagctgtttcctgtgtgaaattgttatccgctcacaattccacacaacatacgagccggaagcataaagtgtaaagcctggggtgcctaatgagtgagctaactcacattaattgcgttgcgctcactgcccgctttccagtcgggaaacctgtcgtgccagctgcattaatgaatcggccaacgcgcggggagaggcggtttgcgtattgggcgctcttccgcttcctcgctcactgactcgctgcgctcggtcgttcggctgcggcgagcggtatcagctcactcaaaggcggtaatacggttatccacagaatcaggggataacgcaggaaagaacatgtgagcaaaaggccagcaaaaggccaggaaccgtaaaaaggccgcgttgctggcgtttttccataggctccgcccccctgacgagcatcacaaaaatcgacgctcaagtcagaggtggcgaaacccgacaggactataaagataccaggcgtttccccctggaagctccctcgtgcgctctcctgttccgaccctgccgcttaccggatacctgtccgcctttctcccttcgggaagcgtggcgctttctcatagctcacgctgtaggtatctcagttcggtgtaggtcgttcgctccaagctgggctgtgtgcacgaaccccccgttcagcccgaccgctgcgccttatccggtaactatcgtcttgagtccaacccggtaagacacgacttatcgccactggcagcagccactggtaacaggattagcagagcgaggtatgtaggcggtgctacagagttcttgaagtggtggcctaactacggctacactagaaggacagtatttggtatctgcgctctgctgaagccagttaccttcggaaaaagagttggtagctcttgatccggcaaacaaaccaccgctggtagcggtggtttttttgtttgcaagcagcagattacgcgcagaaaaaaaggatctcaagaagatcctttgatcttttctacggggtctgacgctcagtggaacgaaaactcacgttaagggattttggtcatgagattatcaaaaaggatcttcacctagatccttttaaattaaaaatgaagttttaaatcaatctaaagtatatatgagtaaacttggtctgacagttaccaatgcttaatcagtgaggcacctatctcagcgatctgtctatttcgttcatccatagttgcctgactccccgtcgtgtagataactacgatacgggagggcttaccatctggccccagtgctgcaatgataccgcgagacccacgctcaccggctccagatttatcagcaataaaccagccagccggaagggccgagcgcagaagtggtcctgcaactttatccgcctccatccagtctattaattgttgccgggaagctagagtaagtagttcgccagttaatagtttgcgcaacgttgttgccattgctacaggcatcgtggtgtcacgctcgtcgtttggtatggcttcattcagctccggttcccaacgatcaaggcgagttacatgatcccccatgttgtgcaaaaaagcggttagctccttcggtcctccgatcgttgtcagaagtaagttggccgcagtgttatcactcatggttatggcagcactgcataattctcttactgtcatgccatccgtaagatgcttttctgtgactggtgagtactcaaccaagtcattctgagaatagtgtatgcggcgaccgagttgctcttgcccggcgtcaatacgggataataccgcgccacatagcagaactttaaaagtgctcatcattggaaaacgttcttcggggcgaaaactctcaaggatcttaccgctgttgagatccagttcgatgtaacccactcgtgcacccaactgatcttcagcatcttttactttcaccagcgtttctgggtgagcaaaaacaggaaggcaaaatgccgcaaaaaagggaataagggcgacacggaaatgttgaatactcatactcttcctttttcaatattattgaagcatttatcagggttattgtctcatgagcggatacatatttgaatgtatttagaaaaataaacaaataggggttccgcgcacatttccccgaaaagtgccacctgacgcgccctgtagcggcgcattaagcgcggcgggtgtggtggttacgcgcagcgtgaccgctacacttgccagcgccctagcgcccgctcctttcgctttcttcccttcctttctcgccacgttcgccggctttccccgtcaagctctaaatcggggcatccctttagggttccgatttagtgctttacggcacctcgaccccaaaaaacttgattagggtgatggttcacgtagtgggccatcgccctgatagacggtttttcgccctttgacgttggagtccacgttctttaatagtggactcttgttccaaactggaacaacactcaaccctatctcggtctattcttttgatttataagggattttgccgatttcggcctattggttaaaaaatgagctgatttaacaaaaatttaacgcgaattttaacaaaatattaacaaaatattaacgtttacaatttcccattcgccattcaggctgcgcaactgttgggaagggcgat

SEQ ID NO: 44 - DNA, 6472 bp, Artificial Sequence
  Plasmid pKS238
ctagactggaattcgtcgacgagctccctatagtgagtcgtattagaggccgacttggccaaattcgtaatcatggtcatagctgtttcctgtgtgaaattgttatccgctcacaattccacacaacatacgagccggaagcataaagtgtaaagcctggggtgcctaatgagtgagctaactcacattaattgcgttgcgctcactgcccgctttccagtcgggaaacctgtcgtgccagctgcattaatgaatcggccaacgcgcggggagaggcggtttgcgtattgggcgctcttccgcttcctcgctcactgactcgctgcgctcggtcgttcggctgcggcgagcggtatcagctcactcaaaggcggtaatacggttatccacagaatcaggggataacgcaggaaagaacatgtgagcaaaaggccagcaaaaggccaggaaccgtaaaaaggccgcgttgctggcgtttttccataggctccgcccccctgacgagcatcacaaaaatcgacgctcaagtcagaggtggcgaaacccgacaggactataaagataccaggcgtttccccctggaagctccctcgtgcgctctcctgttccgaccctgccgcttaccggatacctgtccgcctttctcccttcgggaagcgtggcgctttctcatagctcacgctgtaggtatctcagttcggtgtaggtcgttcgctccaagctgggctgtgtgcacgaaccccccgttcagcccgaccgctgcgccttatccggtaactatcgtcttgagtccaacccggtaagacacgacttatcgccactggcagcagccactggtaacaggattagcagagcgaggtatgtaggcggtgctacagagttcttgaagtggtggcctaactacggctacactagaaggacagtatttggtatctgcgctctgctgaagccagttaccttcggaaaaagagttggtagctcttgatccggcaaacaaaccaccgctggtagcggtggtttttttgtttgcaagcagcagattacgcgcagaaaaaaaggatctcaagaagatcctttgatcttttctacggggtctgacgctcagtggaacgaaaactcacgttaagggattttggtcatgagattatcaaaaaggatcttcacctagatccttttaaattaaaaatgaagttttaaatcaatctaaagtatatatgagtaaacttggtctgacagttaccaatgcttaatcagtgaggcacctatctcagcgatctgtctatttcgttcatccatagttgcctgactccccgtcgtgtagataactacgatacgggagggcttaccatctggccccagtgctgcaatgataccgcgagacccacgctcaccggctccagatttatcagcaataaaccagccagccggaagggccgagcgcagaagtggtcctgcaactttatccgcctccatccagtctattaattgttgccgggaagctagagtaagtagttcgccagttaatagtttgcgcaacgttgttgccattgctacaggcatcgtggtgtcacgctcgtcgtttggtatggcttcattcagctccggttcccaacgatcaaggcgagttacatgatcccccatgttgtgcaaaaaagcggttagctccttcggtcctccgatcgttgtcagaagtaagttggccgcagtgttatcactcatggttatggcagcactgcataattctcttactgtcatgccatccgtaagatgcttttctgtgactggtgagtactcaaccaagtcattctgagaatagtgtatgcggcgaccgagttgctcttgcccggcgtcaatacgggataataccgcgccacatagcagaactttaaaagtgctcatcattggaaaacgttcttcggggcgaaaactctcaaggatcttaccgctgttgagatccagttcgatgtaacccactcgtgcacccaactgatcttcagcatcttttactttcaccagcgtttctgggtgagcaaaaacaggaaggcaaaatgccgcaaaaaagggaataagggcgacacggaaatgttgaatactcatactcttcctttttcaatattattgaagcatttatcagggttattgtctcatgagcggatacatatttgaatgtatttagaaaaataaacaaataggggttccgcgcacatttccccgaaaagtgccacctgacgcgccctgtagcggcgcattaagcgcggcgggtgtggtggttacgcgcagcgtgaccgctacacttgccagcgccctagcgcccgctcctttcgctttcttcccttcctttctcgccacgttcgccggctttccccgtcaagctctaaatcggggcatccctttagggttccgatttagtgctttacggcacctcgaccccaaaaaacttgattagggtgatggttcacgtagtgggccatcgccctgatagacggtttttcgccctttgacgttggagtccacgttctttaatagtggactcttgttccaaactggaacaacactcaaccctatctcggtctattcttttgatttataagggattttgccgatttcggcctattggttaaaaaatgagctgatttaacaaaaatttaacgcgaattttaacaaaatattaacaaaatattaacgtttacaatttcccattcgccattcaggctgcgcaactgttgggaagggcgatcggtgcgggcctcttcgctattacgccagctggcgaaagggggatgtgctgcaaggcgattaagttgggtaacgccagggttttcccagtcacgacgttgtaaaacgacggccagtgccaagctgacttggtcagcggccgctctagaactagtggatcctagcctaagtacgtactcaaaatgccaacaaataaaaaaaaagttgctttaataatgccaaaacaaattaataaaacacttacaacaccggattttttttaattaaaatgtgccatttaggataaatagttaatatttttaataattatttaaaaagccgtatctactaaaatgatttttatttggttgaaaatattaatatgtttaaatcaacacaatctatcaaaattaaactaaaaaaaaaataagtgtacgtggttaacattagtacagtaatataagaggaaaatgagaaattaagaaattgaaagcgagtctaatttttaaattatgaacctgcatatataaaaggaaagaaagaatccaggaagaaaagaaatgaaaccatgcatggtcccctcgtcatcacgagtttctgccatttgcaatagaaacactgaaacacctttctctttgtcacttaattgagatgccgaagccacctcacaccatgaacttcatgaggtgtagcacccaaggcttccatagccatgcatactgaagaatgtctcaagctcagcaccctacttctgtgacgtgtccctcattcaccttcctctcttccctataaataaccacgcctcaggttctccgcttcacaactcaaacattctctccattggtccttaaacactcatcagtcatcaccatggccaagctagttttttccctttgttttctgcttttcagtggctgctgcttcgctttcagttccagagagcagcctcagcaaaacgagtgccagatccaaaaactcaatgccctcaaaccggataaccgtatagagtcagaaggagggctcattgagacatggaaccctaacaacaagccattccagtgtgccggtgttgccctctctcgctgcaccctcaaccgcaacgcccttcgtagaccttcctacaccaacggtccccaggaaatctacatccaacaaggtaagggtatttttggcatgatatacccgggttgtcctagcacatttgaagagcctcagcaacctcaacaaagaggacaaagcagcagaccacaagaccgtcaccagaagatctataacttcagagagggtgatttgatcgcagtgcctactggtgttgcatggtggatgtacaacaatgaagacactcctgttgttgccgtttctattattgacaccaacagcttggagaaccagctcgaccagatgcctaggagattctatcttgctgggaaccaagagcaagagtttctaaaatatcagcaagagcaaggaggtcatcaaagccagaaaggaaagcatcagcaagaagaagaaaacgaaggaggcagcatattgagtggcttcaccctggaattcttggaacatgcattcagcgtggacaagcagatagcgaaaaacctacaaggagagaacgaaggggaagacaagggagccattgtgacagtgaaaggaggtctgagcgtgttaaaaccacccacggacgagcagcaacaaagaccccaggaagaggaagaagaagaagaggatgagaagccacagtgcaagggtaaagacaaacactgccaacgcccccgaggaagccaaagcaaaagcagaagaaatggcattgacgagaccatatgcaccatgagacttcgccacaacattggccagacttcatcacctgacatctacaaccctcaagccggtagcgtcacaaccgccaccagccttgacttcccagccctctcgtggctcagactcagtgctgagtttggatctctccgcaagaatgcaatgttcgtgccacactacaacctgaacgcgaacagcataatatacgcattgaatggacgggcattgatacaagtggtgaattgcaacggtgagagagtgtttgatggagagctgcaagagggacgggtgctgatcgtgccacaaaactttgtggtggctgcaagatcacagagtgacaacttcgagtatgtgtcattcaagaccaatgatacacccatgatcggcactcttgcaggggcaaactcattgttgaacgcattaccagaggaagtgattcagcacactttcaacctaaaaagccagcaggccaggcagataaagaacaacaaccctttcaagttcctggttccacctcaggagtctcagaagagagctgtggctggtggtggatctatggctaagattaagtgcacgtggcctgagctggtgggcaagaccgtggagaaagccaagaagatgatcatgaaggacaagccagaggcgaagatcatggttctgccagttgggaccaaagtgaccggtgaatggaagatggatcgcgtccgcctctgggtcgataagaaggacaagatcgccaagactccgaagtgcggctagggtacctctagggtggcggccgcaagtatgaactaaaatgcatgtaggtgtaagagctcatggagagcatggaatattgtatccgaccatgtaacagtataataactgagctccatctcacttcttctatgaataaacaaaggatgttatgatatattaacactctatctatgcaccttattgttctatgataaatttcctcttattattataaatcatctgaatcgtgacggcttatggaatgcttcaaatagtacaaaaacaaatgtgtactataagactttctaaacaattctaaccttagcattgtgaacgagacataagtgttaagaagacataacaattataatggaagaagtttgtctccatttatatattatatattacccacttatgtattatattaggatgttaaggagacataacaattataaagagagaagtttgtatccatttatatattatatactacccatttatatattatacttatccacttatttaatgtctttataaggtttgatccatgatatttctaatattttagttgatatgtatatgaaagggtactatttgaactctcttactctgtataaaggttggatcatccttaaagtgggtctatttaattttattgcttcttacagataaaaaaaaaattatgagttggtttgataaaatattgaaggatttaaaataataataaataacatataatatatgtatataaatttattataatataacatttatctataaaaaagtaaatattgtcataaatctatacaatcgtttagccttgctggacgaatctcaattatttaaacgagagtaaacatatttgactttttggttatttaacaaattattatttaacactatatgaaatttttttttttatcagcaaagaataaaattaaattaagaaggacaatggtgtcccaatccttatacaaccaacttccacaagaaagtcaagtcagagacaacaaaaaaacaagcaaaggaaattttttaatttgagttgtcttgtttgctgcataatttatgcagtaaaacactacacataacccttttagcagtagagcaatggttgaccgtgtgcttagcttcttttattttatttttttatcagcaaagaataaataaaataaaatgagacacttcagggatgtttcaacaagct

SEQ ID NO: 45 - DNA, 6259 bp, Artificial Sequence
  Plasmid pKS240
ctctagggtggcggccgcaagtatgaactaaaatgcatgtaggtgtaagagctcatggagagcatggaatattgtatccgaccatgtaacagtataataactgagctccatctcacttcttctatgaataaacaaaggatgttatgatatattaacactctatctatgcaccttattgttctatgataaatttcctcttattattataaatcatctgaatcgtgacggcttatggaatgcttcaaatagtacaaaaacaaatgtgtactataagactttctaaacaattctaaccttagcattgtgaacgagacataagtgttaagaagacataacaattataatggaagaagtttgtctccatttatatattatatattacccacttatgtattatattaggatgttaaggagacataacaattataaagagagaagtttgtatccatttatatattatatactacccatttatatattatacttatccacttatttaatgtctttataaggtttgatccatgatatttctaatattttagttgatatgtatatgaaagggtactatttgaactctcttactctgtataaaggttggatcatccttaaagtgggtctatttaattttattgcttcttacagataaaaaaaaaattatgagttggtttgataaaatattgaaggatttaaaataataataaataacatataatatatgtatataaatttattataatataacatttatctataaaaaagtaaatattgtcataaatctatacaatcgtttagccttgctggacgaatctcaattatttaaacgagagtaaacatatttgactttttggttatttaacaaattattatttaacactatatgaaatttttttttttatcagcaaagaataaaattaaattaagaaggacaatggtgtcccaatccttatacaaccaacttccacaagaaagtcaagtcagagacaacaaaaaaacaagcaaaggaaattttttaatttgagttgtcttgtttgctgcataatttatgcagtaaaacactacacataacccttttagcagtagagcaatggttgaccgtgtgcttagcttcttttattttatttttttatcagcaaagaataaataaaataaaatgagacacttcagggatgtttcaacaagctctagactggaattcgtcgacgagctccctatagtgagtcgtattagaggccgacttggccaaattcgtaatcatggtcatagctgtttcctgtgtgaaattgttatccgctcacaattccacacaacatacgagccggaagcataaagtgtaaagcctggggtgcctaatgagtgagctaactcacattaattgcgttgcgctcactgcccgctttccagtcgggaaacctgtcgtgccagctgcattaatgaatcggccaacgcgcggggagaggcggtttgcgtattgggcgctcttccgcttcctcgctcactgactcgctgcgctcggtcgttcggctgcggcgagcggtatcagctcactcaaaggcggtaatacggttatccacagaatcaggggataacgcaggaaagaacatgtgagcaaaaggccagcaaaaggccaggaaccgtaaaaaggccgcgttgctggcgtttttccataggctccgcccccctgacgagcatcacaaaaatcgacgctcaagtcagaggtggcgaaacccgacaggactataaagataccaggcgtttccccctggaagctccctcgtgcgctctcctgttccgaccctgccgcttaccggatacctgtccgcctttctcccttcgggaagcgtggcgctttctcatagctcacgctgtaggtatctcagttcggtgtaggtcgttcgctccaagctgggctgtgtgcacgaaccccccgttcagcccgaccgctgcgccttatccggtaactatcgtcttgagtccaacccggtaagacacgacttatcgccactggcagcagccactggtaacaggattagcagagcgaggtatgtaggcggtgctacagagttcttgaagtggtggcctaactacggctacactagaaggacagtatttggtatctgcgctctgctgaagccagttaccttcggaaaaagagttggtagctcttgatccggcaaacaaaccaccgctggtagcggtggtttttttgtttgcaagcagcagattacgcgcagaaaaaaaggatctcaagaagatcctttgatcttttctacggggtctgacgctcagtggaacgaaaactcacgttaagggattttggtcatgagattatcaaaaaggatcttcacctagatccttttaaattaaaaatgaagttttaaatcaatctaaagtatatatgagtaaacttggtctgacagttaccaatgcttaatcagtgaggcacctatctcagcgatctgtctatttcgttcatccatagttgcctgactccccgtcgtgtagataactacgatacgggagggcttaccatctggccccagtgctgcaatgataccgcgagacccacgctcaccggctccagatttatcagcaataaaccagccagccggaagggccgagcgcagaagtggtcctgcaactttatccgcctccatccagtctattaattgttgccgggaagctagagtaagtagttcgccagttaatagtttgcgcaacgttgttgccattgctacaggcatcgtggtgtcacgctcgtcgtttggtatggcttcattcagctccggttcccaacgatcaaggcgagttacatgatcccccatgttgtgcaaaaaagcggttagctccttcggtcctccgatcgttgtcagaagtaagttggccgcagtgttatcactcatggttatggcagcactgcataattctcttactgtcatgccatccgtaagatgcttttctgtgactggtgagtactcaaccaagtcattctgagaatagtgtatgcggcgaccgagttgctcttgcccggcgtcaatacgggataataccgcgccacatagcagaactttaaaagtgctcatcattggaaaacgttcttcggggcgaaaactctcaaggatcttaccgctgttgagatccagttcgatgtaacccactcgtgcacccaactgatcttcagcatcttttactttcaccagcgtttctgggtgagcaaaaacaggaaggcaaaatgccgcaaaaaagggaataagggcgacacggaaatgttgaatactcatactcttcctttttcaatattattgaagcatttatcagggttattgtctcatgagcggatacatatttgaatgtatttagaaaaataaacaaataggggttccgcgcacatttccccgaaaagtgccacctgacgcgccctgtagcggcgcattaagcgcggcgggtgtggtggttacgcgcagcgtgaccgctacacttgccagcgccctagcgcccgctcctttcgctttcttcccttcctttctcgccacgttcgccggctttccccgtcaagctctaaatcggggcatccctttagggttccgatttagtgctttacggcacctcgaccccaaaaaacttgattagggtgatggttcacgtagtgggccatcgccctgatagacggtttttcgccctttgacgttggagtccacgttctttaatagtggactcttgttccaaactggaacaacactcaaccctatctcggtctattcttttgatttataagggattttgccgatttcggcctattggttaaaaaatgagctgatttaacaaaaatttaacgcgaattttaacaaaatattaacaaaatattaacgtttacaatttcccattcgccattcaggctgcgcaactgttgggaagggcgatcggtgcgggcctcttcgctattacgccagctggcgaaagggggatgtgctgcaaggcgattaagttgggtaacgccagggttttcccagtcacgacgttgtaaaacgacggccagtgccaagctgacttggtcagcggccgctctagaactagtggatcctagcctaagtacgtactcaaaatgccaacaaataaaaaaaaagttgctttaataatgccaaaacaaattaataaaacacttacaacaccggattttttttaattaaaatgtgccatttaggataaatagttaatatttttaataattatttaaaaagccgtatctactaaaatgatttttatttggttgaaaatattaatatgtttaaatcaacacaatctatcaaaattaaactaaaaaaaaaataagtgtacgtggttaacattagtacagtaatataagaggaaaatgagaaattaagaaattgaaagcgagtctaatttttaaattatgaacctgcatatataaaaggaaagaaagaatccaggaagaaaagaaatgaaaccatgcatggtcccctcgtcatcacgagtttctgccatttgcaatagaaacactgaaacacctttctctttgtcacttaattgagatgccgaagccacctcacaccatgaacttcatgaggtgtagcacccaaggcttccatagccatgcatactgaagaatgtctcaagctcagcaccctacttctgtgacgtgtccctcattcaccttcctctcttccctataaataaccacgcctcaggttctccgcttcacaactcaaacattctctccattggtccttaaacactcatcagtcatcaccatggccaagctagttttttccctttgttttctgcttttcagtggctgctgcttcgctttcagttccagagagcagcctcagcaaaacgagtgccagatccaaaaactcaatgccctcaaaccggataaccgtatagagtcagaaggagggctcattgagacatggaaccctaacaacaagccattccagtgtgccggtgttgccctctctcgctgcaccctcaaccgcaacgcccttcgtagaccttcctacaccaacggtccccaggaaatctacatccaacaaggtaagggtatttttggcatgatatacccgggttgtcctagcacatttgaagagcctcagcaacctcaacaaagaggacaaagcagcagaccacaagaccgtcaccagaagatctataacttcagagagggtgatttgatcgcagtgcctactggtgttgcatggtggatgtacaacaatgaagacactcctgttgttgccgtttctattattgacaccaacagcttggagaaccagctcgaccagatgcctaggagattctatcttgctgggaaccaagagcaagagtttctaaaatatcagcaagagcaaggaggtcatcaaagccagaaaggaaagcatcagcaagaagaagaaaacgaaggaggcagcatattgagtggcttcaccctggaattcttggaacatgcattcagcgtggacaagcagatagcgaaaaacctacaaggagagaacgaaggggaagacaagggagccattgtgacagtgaaaggaggtctgagcgtgttaaaaccacccacggacgagcagcaacaaagaccccaggaagaggaagaagaagaagaggatgagaagccacagtgcaagggtaaagacaaacactgccaacgcccccgaggaagccaaagcaaaagcagaagaaatggcattgacgagaccatatgcaccatgagacttcgccacaacattggccagacttcatcacctgacatctacaaccctcaagccggtagcgtcacaaccgccaccagccttgacttcccagccctctcgtggctcagactcagtgctgagtttggatctctccgcaagaatgcaatgttcgtgccacactacaacctgaacgcgaacagcataatatacgcattgaatggacgggcattgatacaagtggtgaattgcaacggtgagagagtgtttgatggagagctgcaagagggacgggtgctgatcgtgccacaaaactttgtggtggctgcaagatcacagagtgacaacttcgagtatgtgtcattcaagaccaatgatacacccatgatcggcactcttgcaggggcaaactcattgttgaacgcattaccagaggaagtgattcagcacactttcaacctaaaaagccagcaggccaggcagataaagaacaacaaccctttcaagttcctggttccacctcaggagtctcagaagagagctgtggcttagggtac

SEQ ID NO: 46 - DNA, 5267 bp, Artificial Sequence
  Plasmid pKS120
atctgatcaacctgcattaatgaatcggccaacgcgcggggagaggcggtttgcgtattgggcgctcttccgcttcctcgctcactgactcgctgcgctcggtcgttcggctgcggcgagcggtatcagctcactcaaaggcggtaatacggttatccacagaatcaggggataacgcaggaaagaacatgtgagcaaaaggccagcaaaaggccaggaaccgtaaaaaggccgcgttgctggcgtttttccataggctccgcccccctgacgagcatcacaaaaatcgacgctcaagtcagaggtggcgaaacccgacaggactataaagataccaggcgtttccccctggaagctccctcgtgcgctctcctgttccgaccctgccgcttaccggatacctgtccgcctttctcccttcgggaagcgtggcgctttctcaatgctcacgctgtaggtatctcagttcggtgtaggtcgttcgctccaagctgggctgtgtgcacgaaccccccgttcagcccgaccgctgcgccttatccggtaactatcgtcttgagtccaacccggtaagacacgacttatcgccactggcagcagccactggtaacaggattagcagagcgaggtatgtaggcggtgctacagagttcttgaagtggtggcctaactacggctacactagaaggacagtatttggtatctgcgctctgctgaagccagttaccttcggaaaaagagttggtagctcttgatccggcaaacaaaccaccgctggtagcggtggtttttttgtttgcaagcagcagattacgcgcagaaaaaaaggatctcaagaagatcctttgatcttttctacggggtctgacgctcagtggaacgaaaactcacgttaagggattttggtcatgacattaacctataaaaataggcgtatcacgaggccctttcgtctcgcgcgtttcggtgatgacggtgaaaacctctgacacatgcagctcccggagacggtcacagcttgtctgtaagcggatgccgggagcagacaagcccgtcagggcgcgtcagcgggtgttggcgggtgtcggggctggcttaactatgcggcatcagagcagattgtactgagagtgcaccatatggacatattgtcgttagaacgcggctacaattaatacataaccttatgtatcatacacatacgatttaggtgacactatagaacggcgcgccaagcttggatccgtcgacggcgcgcccgatcatccggatatagttcctcctttcagcaaaaaacccctcaagacccgtttagaggccccaaggggttatgctagttattgctcagcggtggcagcagccaactcagcttcctttcgggctttgttagcagccggatcgatccaagctgtacctcactattcctttgccctcggacgagtgctggggcgtcggtttccactatcggcgagtacttctacacagccatcggtccagacggccgcgcttctgcgggcgatttgtgtacgcccgacagtcccggctccggatcggacgattgcgtcgcatcgaccctgcgcccaagctgcatcatcgaaattgccgtcaaccaagctctgatagagttggtcaagaccaatgcggagcatatacgcccggagccgcggcgatcctgcaagctccggatgcctccgctcgaagtagcgcgtctgctgctccatacaagccaaccacggcctccagaagaagatgttggcgacctcgtattgggaatccccgaacatcgcctcgctccagtcaatgaccgctgttatgcggccattgtccgtcaggacattgttggagccgaaatccgcgtgcacgaggtgccggacttcggggcagtcctcggcccaaagcatcagctcatcgagagcctgcgcgacggacgcactgacggtgtcgtccatcacagtttgccagtgatacacatggggatcagcaatcgcgcatatgaaatcacgccatgtagtgtattgaccgattccttgcggtccgaatgggccgaacccgctcgtctggctaagatcggccgcagcgatcgcatccatagcctccgcgaccggctgcagaacagcgggcagttcggtttcaggcaggtcttgcaacgtgacaccctgtgcacggcgggagatgcaataggtcaggctctcgctgaattccccaatgtcaagcacttccggaatcgggagcgcggccgatgcaaagtgccgataaacataacgatctttgtagaaaccatcggcgcagctatttacccgcaggacatatccacgccctcctacatcgaagctgaaagcacgagattcttcgccctccgagagctgcatcaggtcggagacgctgtcgaacttttcgatcagaaacttctcgacagacgtcgcggtgagttcaggcttttccatgggtatatctccttcttaaagttaaacaaaattatttctagagggaaaccgttgtggtctccctatagtgagtcgtattaatttcgcgggatcgagatcgatccaattccaatcccacaaaaatctgagcttaacagcacagttgctcctctcagagcagaatcgggtattcaacaccctcatatcaactactacgttgtgtataacggtccacatgccggtatatacgatgactggggttgtacaaaggcggcaacaaacggcgttcccggagttgcacacaagaaatttgccactattacagaggcaagagcagcagctgacgcgtacacaacaagtcagcaaacagacaggttgaacttcatccccaaaggagaagctcaactcaagcccaagagctttgctaaggccctaacaagcccaccaaagcaaaaagcccactggctcacgctaggaaccaaaaggcccagcagtgatccagccccaaaagagatctcctttgccccggagattacaatggacgatttcctctatctttacgatctaggaaggaagttcgaaggtgaaggtgacgacactatgttcaccactgataatgagaaggttagcctcttcaatttcagaaagaatgctgacccacagatggttagagaggcctacgcagcaggtctcatcaagacgatctacccgagtaacaatctccaggagatcaaataccttcccaagaaggttaaagatgcagtcaaaagattcaggactaattgcatcaagaacacagagaaagacatatttctcaagatcagaagtactattccagtatggacgattcaaggcttgcttcataaaccaaggcaagtaatagagattggagtctctaaaaaggtagttcctactgaatctaaggccatgcatggagtctaagattcaaatcgaggatctaacagaactcgccgtgaagactggcgaacagttcatacagagtcttttacgactcaatgacaagaagaaaatcttcgtcaacatggtggagcacgacactctggtctactccaaaaatgtcaaagatacagtctcagaagaccaaagggctattgagacttttcaacaaaggataatttcgggaaacctcctcggattccattgcccagctatctgtcacttcatcgaaaggacagtagaaaaggaaggtggctcctacaaatgccatcattgcgataaaggaaaggctatcattcaagatgcctctgccgacagtggtcccaaagatggacccccacccacgaggagcatcgtggaaaaagaagacgttccaaccacgtcttcaaagcaagtggattgatgtgacatctccactgacgtaagggatgacgcacaatcccactatccttcgcaagacccttcctctatataaggaagttcatttcatttggagaggacacgctcgagctcatttctctattacttcagccataacaaaagaactcttttctcttcttattaaaccatgaaaaagcctgaactcaccgcgacgtctgtcgagaagtttctgatcgaaaagttcgacagcgtctccgacctgatgcagctctcggagggcgaagaatctcgtgctttcagcttcgatgtaggagggcgtggatatgtcctgcgggtaaatagctgcgccgatggtttctacaaagatcgttatgtttatcggcactttgcatcggccgcgctcccgattccggaagtgcttgacattggggaattcagcgagagcctgacctattgcatctcccgccgtgcacagggtgtcacgttgcaagacctgcctgaaaccgaactgcccgctgttctgcagccggtcgcggaggccatggatgcgatcgctgcggccgatcttagccagacgagcgggttcggcccattcggaccgcaaggaatcggtcaatacactacatggcgtgatttcatatgcgcgattgctgatccccatgtgtatcactggcaaactgtgatggacgacaccgtcagtgcgtccgtcgcgcaggctctcgatgagctgatgctttgggccgaggactgccccgaagtccggcacctcgtgcacgcggatttcggctccaacaatgtcctgacggacaatggccgcataacagcggtcattgactggagcgaggcgatgttcggggattcccaatacgaggtcgccaacatcttcttctggaggccgtggttggcttgtatggagcagcagacgcgctacttcgagcggaggcatccggagcttgcaggatcgccgcggctccgggcgtatatgctccgcattggtcttgaccaactctatcagagcttggttgacggcaatttcgatgatgcagcttgggcgcagggtcgatgcgacgcaatcgtccgatccggagccgggactgtcgggcgtacacaaatcgcccgcagaagcgcggccgtctggaccgatggctgtgtagaagtactcgccgatagtggaaaccgacgccccagcactcgtccgagggcaaaggaatagtgaggtacctaaagaaggagtgcgtcgaagcagatcgttcaaacatttggcaataaagtttcttaagattgaatcctgttgccggtcttgcgatgattatcatataatttctgttgaattacgttaagcatgtaataattaacatgtaatgcatgacgttatttatgagatgggtttttatgattagagtcccgcaattatacatttaatacgcgatagaaaacaaaatatagcgcgcaaactaggataaattatcgcgcgcggtgtcatctatgttactagatcgatgtcga

SEQ ID NO: 47 - DNA, 8643 bp, Artificial Sequence
  Plasmid pKS242
tcgacggcgcgcccgatcatccggatatagttcctcctttcagcaaaaaacccctcaagacccgtttagaggccccaaggggttatgctagttattgctcagcggtggcagcagccaactcagcttcctttcgggctttgttagcagccggatcgatccaagctgtacctcactattcctttgccctcggacgagtgctggggcgtcggtttccactatcggcgagtacttctacacagccatcggtccagacggccgcgcttctgcgggcgatttgtgtacgcccgacagtcccggctccggatcggacgattgcgtcgcatcgaccctgcgcccaagctgcatcatcgaaattgccgtcaaccaagctctgatagagttggtcaagaccaatgcggagcatatacgcccggagccgcggcgatcctgcaagctccggatgcctccgctcgaagtagcgcgtctgctgctccatacaagccaaccacggcctccagaagaagatgttggcgacctcgtattgggaatccccgaacatcgcctcgctccagtcaatgaccgctgttatgcggccattgtccgtcaggacattgttggagccgaaatccgcgtgcacgaggtgccggacttcggggcagtcctcggcccaaagcatcagctcatcgagagcctgcgcgacggacgcactgacggtgtcgtccatcacagtttgccagtgatacacatggggatcagcaatcgcgcatatgaaatcacgccatgtagtgtattgaccgattccttgcggtccgaatgggccgaacccgctcgtctggctaagatcggccgcagcgatcgcatccatagcctccgcgaccggctgcagaacagcgggcagttcggtttcaggcaggtcttgcaacgtgacaccctgtgcacggcgggagatgcaataggtcaggctctcgctgaattccccaatgtcaagcacttccggaatcgggagcgcggccgatgcaaagtgccgataaacataacgatctttgtagaaaccatcggcgcagctatttacccgcaggacatatccacgccctcctacatcgaagctgaaagcacgagattcttcgccctccgagagctgcatcaggtcggagacgctgtcgaacttttcgatcagaaacttctcgacagacgtcgcggtgagttcaggcttttccatgggtatatctccttcttaaagttaaacaaaattatttctagagggaaaccgttgtggtctccctatagtgagtcgtattaatttcgcgggatcgagatcgatccaattccaatcccacaaaaatctgagcttaacagcacagttgctcctctcagagcagaatcgggtattcaacaccctcatatcaactactacgttgtgtataacggtccacatgccggtatatacgatgactggggttgtacaaaggcggcaacaaacggcgttcccggagttgcacacaagaaatttgccactattacagaggcaagagcagcagctgacgcgtacacaacaagtcagcaaacagacaggttgaacttcatccccaaaggagaagctcaactcaagcccaagagctttgctaaggccctaacaagcccaccaaagcaaaaagcccactggctcacgctaggaaccaaaaggcccagcagtgatccagccccaaaagagatctcctttgccccggagattacaatggacgatttcctctatctttacgatctaggaaggaagttcgaaggtgaaggtgacgacactatgttcaccactgataatgagaaggttagcctcttcaatttcagaaagaatgctgacccacagatggttagagaggcctacgcagcaggtctcatcaagacgatctacccgagtaacaatctccaggagatcaaataccttcccaagaaggttaaagatgcagtcaaaagattcaggactaattgcatcaagaacacagagaaagacatatttctcaagatcagaagtactattccagtatggacgattcaaggcttgcttcataaaccaaggcaagtaatagagattggagtctctaaaaaggtagttcctactgaatctaaggccatgcatggagtctaagattcaaatcgaggatctaacagaactcgccgtgaagactggcgaacagttcatacagagtcttttacgactcaatgacaagaagaaaatcttcgtcaacatggtggagcacgacactctggtctactccaaaaatgtcaaagatacagtctcagaagaccaaagggctattgagacttttcaacaaaggataatttcgggaaacctcctcggattccattgcccagctatctgtcacttcatcgaaaggacagtagaaaaggaaggtggctcctacaaatgccatcattgcgataaaggaaaggctatcattcaagatgcctctgccgacagtggtcccaaagatggacccccacccacgaggagcatcgtggaaaaagaagacgttccaaccacgtcttcaaagcaagtggattgatgtgacatctccactgacgtaagggatgacgcacaatcccactatccttcgcaagacccttcctctatataaggaagttcatttcatttggagaggacacgctcgagctcatttctctattacttcagccataacaaaagaactcttttctcttcttattaaaccatgaaaaagcctgaactcaccgcgacgtctgtcgagaagtttctgatcgaaaagttcgacagcgtctccgacctgatgcagctctcggagggcgaagaatctcgtgctttcagcttcgatgtaggagggcgtggatatgtcctgcgggtaaatagctgcgccgatggtttctacaaagatcgttatgtttatcggcactttgcatcggccgcgctcccgattccggaagtgcttgacattggggaattcagcgagagcctgacctattgcatctcccgccgtgcacagggtgtcacgttgcaagacctgcctgaaaccgaactgcccgctgttctgcagccggtcgcggaggccatggatgcgatcgctgcggccgatcttagccagacgagcgggttcggcccattcggaccgcaaggaatcggtcaatacactacatggcgtgatttcatatgcgcgattgctgatccccatgtgtatcactggcaaactgtgatggacgacaccgtcagtgcgtccgtcgcgcaggctctcgatgagctgatgctttgggccgaggactgccccgaagtccggcacctcgtgcacgcggatttcggctccaacaatgtcctgacggacaatggccgcataacagcggtcattgactggagcgaggcgatgttcggggattcccaatacgaggtcgccaacatcttcttctggaggccgtggttggcttgtatggagcagcagacgcgctacttcgagcggaggcatccggagcttgcaggatcgccgcggctccgggcgtatatgctccgcattggtcttgaccaactctatcagagcttggttgacggcaatttcgatgatgcagcttgggcgcagggtcgatgcgacgcaatcgtccgatccggagccgggactgtcgggcgtacacaaatcgcccgcagaagcgcggccgtctggaccgatggctgtgtagaagtactcgccgatagtggaaaccgacgccccagcactcgtccgagggcaaaggaatagtgaggtacctaaagaaggagtgcgtcgaagcagatcgttcaaacatttggcaataaagtttcttaagattgaatcctgttgccggtcttgcgatgattatcatataatttctgttgaattacgttaagcatgtaataattaacatgtaatgcatgacgttatttatgagatgggtttttatgattagagtcccgcaattatacatttaatacgcgatagaaaacaaaatatagcgcgcaaactaggataaattatcgcgcgcggtgtcatctatgttactagatcgatgtcgaatctgatcaacctgcattaatgaatcggccaacgcgcggggagaggcggtttgcgtattgggcgctcttccgcttcctcgctcactgactcgctgcgctcggtcgttcggctgcggcgagcggtatcagctcactcaaaggcggtaatacggttatccacagaatcaggggataacgcaggaaagaacatgtgagcaaaaggccagcaaaaggccaggaaccgtaaaaaggccgcgttgctggcgtttttccataggctccgcccccctgacgagcatcacaaaaatcgacgctcaagtcagaggtggcgaaacccgacaggactataaagataccaggcgtttccccctggaagctccctcgtgcgctctcctgttccgaccctgccgcttaccggatacctgtccgcctttctcccttcgggaagcgtggcgctttctcaatgctcacgctgtaggtatctcagttcggtgtaggtcgttcgctccaagctgggctgtgtgcacgaaccccccgttcagcccgaccgctgcgccttatccggtaactatcgtcttgagtccaacccggtaagacacgacttatcgccactggcagcagccactggtaacaggattagcagagcgaggtatgtaggcggtgctacagagttcttgaagtggtggcctaactacggctacactagaaggacagtatttggtatctgcgctctgctgaagccagttaccttcggaaaaagagttggtagctcttgatccggcaaacaaaccaccgctggtagcggtggtttttttgtttgcaagcagcagattacgcgcagaaaaaaaggatctcaagaagatcctttgatcttttctacggggtctgacgctcagtggaacgaaaactcacgttaagggattttggtcatgacattaacctataaaaataggcgtatcacgaggccctttcgtctcgcgcgtttcggtgatgacggtgaaaacctctgacacatgcagctcccggagacggtcacagcttgtctgtaagcggatgccgggagcagacaagcccgtcagggcgcgtcagcgggtgttggcgggtgtcggggctggcttaactatgcggcatcagagcagattgtactgagagtgcaccatatggacatattgtcgttagaacgcggctacaattaatacataaccttatgtatcatacacatacgatttaggtgacactatagaacggcgcgccaagcttggatcctagcctaagtacgtactcaaaatgccaacaaataaaaaaaaagttgctttaataatgccaaaacaaattaataaaacacttacaacaccggattttttttaattaaaatgtgccatttaggataaatagttaatatttttaataattatttaaaaagccgtatctactaaaatgatttttatttggttgaaaatattaatatgtttaaatcaacacaatctatcaaaattaaactaaaaaaaaaataagtgtacgtggttaacattagtacagtaatataagaggaaaatgagaaattaagaaattgaaagcgagtctaatttttaaattatgaacctgcatatataaaaggaaagaaagaatccaggaagaaaagaaatgaaaccatgcatggtcccctcgtcatcacgagtttctgccatttgcaatagaaacactgaaacacctttctctttgtcacttaattgagatgccgaagccacctcacaccatgaacttcatgaggtgtagcacccaaggcttccatagccatgcatactgaagaatgtctcaagctcagcaccctacttctgtgacgtgtccctcattcaccttcctctcttccctataaataaccacgcctcaggttctccgcttcacaactcaaacattctctccattggtccttaaacactcatcagtcatcaccatggccaagctagttttttccctttgttttctgcttttcagtggctgctgcttcgctttcagttccagagagcagcctcagcaaaacgagtgccagatccaaaaactcaatgccctcaaaccggataaccgtatagagtcagaaggagggctcattgagacatggaaccctaacaacaagccattccagtgtgccggtgttgccctctctcgctgcaccctcaaccgcaacgcccttcgtagaccttcctacaccaacggtccccaggaaatctacatccaacaaggtaagggtatttttggcatgatatacccgggttgtcctagcacatttgaagagcctcagcaacctcaacaaagaggacaaagcagcagaccacaagaccgtcaccagaagatctataacttcagagagggtgatttgatcgcagtgcctactggtgttgcatggtggatgtacaacaatgaagacactcctgttgttgccgtttctattattgacaccaacagcttggagaaccagctcgaccagatgcctaggagattctatcttgctgggaaccaagagcaagagtttctaaaatatcagcaagagcaaggaggtcatcaaagccagaaaggaaagcatcagcaagaagaagaaaacgaaggaggcagcatattgagtggcttcaccctggaattcttggaacatgcattcagcgtggacaagcagatagcgaaaaacctacaaggagagaacgaaggggaagacaagggagccattgtgacagtgaaaggaggtctgagcgtgttaaaaccacccacggacgagcagcaacaaagaccccaggaagaggaagaagaagaagaggatgagaagccacagtgcaagggtaaagacaaacactgccaacgcccccgaggaagccaaagcaaaagcagaagaaatggcattgacgagaccatatgcaccatgagacttcgccacaacattggccagacttcatcacctgacatctacaaccctcaagccggtagcgtcacaaccgccaccagccttgacttcccagccctctcgtggctcagactcagtgctgagtttggatctctccgcaagaatgcaatgttcgtgccacactacaacctgaacgcgaacagcataatatacgcattgaatggacgggcattgatacaagtggtgaattgcaacggtgagagagtgtttgatggagagctgcaagagggacgggtgctgatcgtgccacaaaactttgtggtggctgcaagatcacagagtgacaacttcgagtatgtgtcattcaagaccaatgatacacccatgatcggcactcttgcaggggcaaactcattgttgaacgcattaccagaggaagtgattcagcacactttcaacctaaaaagccagcaggccaggcagataaagaacaacaaccctttcaagttcctggttccacctcaggagtctcagaagagagctgtggcttagggtacctctagggtggcggccgcaagtatgaactaaaatgcatgtaggtgtaagagctcatggagagcatggaatattgtatccgaccatgtaacagtataataactgagctccatctcacttcttctatgaataaacaaaggatgttatgatatattaacactctatctatgcaccttattgttctatgataaatttcctcttattattataaatcatctgaatcgtgacggcttatggaatgcttcaaatagtacaaaaacaaatgtgtactataagactttctaaacaattctaaccttagcattgtgaacgagacataagtgttaagaagacataacaattataatggaagaagtttgtctccatttatatattatatattacccacttatgtattatattaggatgttaaggagacataacaattataaagagagaagtttgtatccatttatatattatatactacccatttatatattatacttatccacttatttaatgtctttataaggtttgatccatgatatttctaatattttagttgatatgtatatgaaagggtactatttgaactctcttactctgtataaaggttggatcatccttaaagtgggtctatttaattttattgcttcttacagataaaaaaaaaattatgagttggtttgataaaatattgaaggatttaaaataataataaataacatataatatatgtatataaatttattataatataacatttatctataaaaaagtaaatattgtcataaatctatacaatcgtttagccttgctggacgaatctcaattatttaaacgagagtaaacatatttgactttttggttatttaacaaattattatttaacactatatgaaatttttttttttatcagcaaagaataaaattaaattaagaaggacaatggtgtcccaatccttatacaaccaacttccacaagaaagtcaagtcagagacaacaaaaaaacaagcaaaggaaattttttaatttgagttgtcttgtttgctgcataatttatgcagtaaaacactacacataacccttttagcagtagagcaatggttgaccgtgtgcttagcttcttttattttatttttttatcagcaaagaataaataaaataaaatgagacacttcagggatgtttcaacaagctctagactggaattcg

SEQ ID NO: 48 - DNA, 8720 bp, Artificial Sequence
  Plasmid pKS349
ggccgcaagtatgaactaaaatgcatgtaggtgtaagagctcatggagagcatggaatattgtatccgaccatgtaacagtataataactgagctccatctcacttcttctatgaataaacaaaggatgttatgatatattaacactctatctatgcaccttattgttctatgataaatttcctcttattattataaatcatctgaatcgtgacggcttatggaatgcttcaaatagtacaaaaacaaatgtgtactataagactttctaaacaattctaaccttagcattgtgaacgagacataagtgttaagaagacataacaattataatggaagaagtttgtctccatttatatattatatattacccacttatgtattatattaggatgttaaggagacataacaattataaagagagaagtttgtatccatttatatattatatactacccatttatatattatacttatccacttatttaatgtctttataaggtttgatccatgatatttctaatattttagttgatatgtatatgaaagggtactatttgaactctcttactctgtataaaggttggatcatccttaaagtgggtctatttaattttattgcttcttacagataaaaaaaaaattatgagttggtttgataaaatattgaaggatttaaaataataataaataacatataatatatgtatataaatttattataatataacatttatctataaaaaagtaaatattgtcataaatctatacaatcgtttagccttgctggacgaatctcaattatttaaacgagagtaaacatatttgactttttggttatttaacaaattattatttaacactatatgaaatttttttttttatcagcaaagaataaaattaaattaagaaggacaatggtgtcccaatccttatacaaccaacttccacaagaaagtcaagtcagagacaacaaaaaaacaagcaaaggaaattttttaatttgagttgtcttgtttgctgcataatttatgcagtaaaacactacacataacccttttagcagtagagcaatggttgaccgtgtgcttagcttcttttattttatttttttatcagcaaagaataaataaaataaaatgagacacttcagggatgtttcaacaagctctagactggaattcgtcgacggcgcgcccgatcatccggatatagttcctcctttcagcaaaaaacccctcaagacccgtttagaggccccaaggggttatgctagttattgctcagcggtggcagcagccaactcagcttcctttcgggctttgttagcagccggatcgatccaagctgtacctcactattcctttgccctcggacgagtgctggggcgtcggtttccactatcggcgagtacttctacacagccatcggtccagacggccgcgcttctgcgggcgatttgtgtacgcccgacagtcccggctccggatcggacgattgcgtcgcatcgaccctgcgcccaagctgcatcatcgaaattgccgtcaaccaagctctgatagagttggtcaagaccaatgcggagcatatacgcccggagccgcggcgatcctgcaagctccggatgcctccgctcgaagtagcgcgtctgctgctccatacaagccaaccacggcctccagaagaagatgttggcgacctcgtattgggaatccccgaacatcgcctcgctccagtcaatgaccgctgttatgcggccattgtccgtcaggacattgttggagccgaaatccgcgtgcacgaggtgccggacttcggggcagtcctcggcccaaagcatcagctcatcgagagcctgcgcgacggacgcactgacggtgtcgtccatcacagtttgccagtgatacacatggggatcagcaatcgcgcatatgaaatcacgccatgtagtgtattgaccgattccttgcggtccgaatgggccgaacccgctcgtctggctaagatcggccgcagcgatcgcatccatagcctccgcgaccggctgcagaacagcgggcagttcggtttcaggcaggtcttgcaacgtgacaccctgtgcacggcgggagatgcaataggtcaggctctcgctgaattccccaatgtcaagcacttccggaatcgggagcgcggccgatgcaaagtgccgataaacataacgatctttgtagaaaccatcggcgcagctatttacccgcaggacatatccacgccctcctacatcgaagctgaaagcacgagattcttcgccctccgagagctgcatcaggtcggagacgctgtcgaacttttcgatcagaaacttctcgacagacgtcgcggtgagttcaggcttttccatgggtatatctccttcttaaagttaaacaaaattatttctagagggaaaccgttgtggtctccctatagtgagtcgtattaatttcgcgggatcgagatcgatccaattccaatcccacaaaaatctgagcttaacagcacagttgctcctctcagagcagaatcgggtattcaacaccctcatatcaactactacgttgtgtataacggtccacatgccggtatatacgatgactggggttgtacaaaggcggcaacaaacggcgttcccggagttgcacacaagaaatttgccactattacagaggcaagagcagcagctgacgcgtacacaacaagtcagcaaacagacaggttgaacttcatccccaaaggagaagctcaactcaagcccaagagctttgctaaggccctaacaagcccaccaaagcaaaaagcccactggctcacgctaggaaccaaaaggcccagcagtgatccagccccaaaagagatctcctttgccccggagattacaatggacgatttcctctatctttacgatctaggaaggaagttcgaaggtgaaggtgacgacactatgttcaccactgataatgagaaggttagcctcttcaatttcagaaagaatgctgacccacagatggttagagaggcctacgcagcaggtctcatcaagacgatctacccgagtaacaatctccaggagatcaaataccttcccaagaaggttaaagatgcagtcaaaagattcaggactaattgcatcaagaacacagagaaagacatatttctcaagatcagaagtactattccagtatggacgattcaaggcttgcttcataaaccaaggcaagtaatagagattggagtctctaaaaaggtagttcctactgaatctaaggccatgcatggagtctaagattcaaatcgaggatctaacagaactcgccgtgaagactggcgaacagttcatacagagtcttttacgactcaatgacaagaagaaaatcttcgtcaacatggtggagcacgacactctggtctactccaaaaatgtcaaagatacagtctcagaagaccaaagggctattgagacttttcaacaaaggataatttcgggaaacctcctcggattccattgcccagctatctgtcacttcatcgaaaggacagtagaaaaggaaggtggctcctacaaatgccatcattgcgataaaggaaaggctatcattcaagatgcctctgccgacagtggtcccaaagatggacccccacccacgaggagcatcgtggaaaaagaagacgttccaaccacgtcttcaaagcaagtggattgatgtgacatctccactgacgtaagggatgacgcacaatcccactatccttcgcaagacccttcctctatataaggaagttcatttcatttggagaggacacgctcgagctcatttctctattacttcagccataacaaaagaactcttttctcttcttattaaaccatgaaaaagcctgaactcaccgcgacgtctgtcgagaagtttctgatcgaaaagttcgacagcgtctccgacctgatgcagctctcggagggcgaagaatctcgtgctttcagcttcgatgtaggagggcgtggatatgtcctgcgggtaaatagctgcgccgatggtttctacaaagatcgttatgtttatcggcactttgcatcggccgcgctcccgattccggaagtgcttgacattggggaattcagcgagagcctgacctattgcatctcccgccgtgcacagggtgtcacgttgcaagacctgcctgaaaccgaactgcccgctgttctgcagccggtcgcggaggccatggatgcgatcgctgcggccgatcttagccagacgagcgggttcggcccattcggaccgcaaggaatcggtcaatacactacatggcgtgatttcatatgcgcgattgctgatccccatgtgtatcactggcaaactgtgatggacgacaccgtcagtgcgtccgtcgcgcaggctctcgatgagctgatgctttgggccgaggactgccccgaagtccggcacctcgtgcacgcggatttcggctccaacaatgtcctgacggacaatggccgcataacagcggtcattgactggagcgaggcgatgttcggggattcccaatacgaggtcgccaacatcttcttctggaggccgtggttggcttgtatggagcagcagacgcgctacttcgagcggaggcatccggagcttgcaggatcgccgcggctccgggcgtatatgctccgcattggtcttgaccaactctatcagagcttggttgacggcaatttcgatgatgcagcttgggcgcagggtcgatgcgacgcaatcgtccgatccggagccgggactgtcgggcgtacacaaatcgcccgcagaagcgcggccgtctggaccgatggctgtgtagaagtactcgccgatagtggaaaccgacgccccagcactcgtccgagggcaaaggaatagtgaggtacctaaagaaggagtgcgtcgaagcagatcgttcaaacatttggcaataaagtttcttaagattgaatcctgttgccggtcttgcgatgattatcatataatttctgttgaattacgttaagcatgtaataattaacatgtaatgcatgacgttatttatgagatgggtttttatgattagagtcccgcaattatacatttaatacgcgatagaaaacaaaatatagcgcgcaaactaggataaattatcgcgcgcggtgtcatctatgttactagatcgatgtcgaatctgatcaacctgcattaatgaatcggccaacgcgcggggagaggcggtttgcgtattgggcgctcttccgcttcctcgctcactgactcgctgcgctcggtcgttcggctgcggcgagcggtatcagctcactcaaaggcggtaatacggttatccacagaatcaggggataacgcaggaaagaacatgtgagcaaaaggccagcaaaaggccaggaaccgtaaaaaggccgcgttgctggcgtttttccataggctccgcccccctgacgagcatcacaaaaatcgacgctcaagtcagaggtggcgaaacccgacaggactataaagataccaggcgtttccccctggaagctccctcgtgcgctctcctgttccgaccctgccgcttaccggatacctgtccgcctttctcccttcgggaagcgtggcgctttctcaatgctcacgctgtaggtatctcagttcggtgtaggtcgttcgctccaagctgggctgtgtgcacgaaccccccgttcagcccgaccgctgcgccttatccggtaactatcgtcttgagtccaacccggtaagacacgacttatcgccactggcagcagccactggtaacaggattagcagagcgaggtatgtaggcggtgctacagagttcttgaagtggtggcctaactacggctacactagaaggacagtatttggtatctgcgctctgctgaagccagttaccttcggaaaaagagttggtagctcttgatccggcaaacaaaccaccgctggtagcggtggtttttttgtttgcaagcagcagattacgcgcagaaaaaaaggatctcaagaagatcctttgatcttttctacggggtctgacgctcagtggaacgaaaactcacgttaagggattttggtcatgacattaacctataaaaataggcgtatcacgaggccctttcgtctcgcgcgtttcggtgatgacggtgaaaacctctgacacatgcagctcccggagacggtcacagcttgtctgtaagcggatgccgggagcagacaagcccgtcagggcgcgtcagcgggtgttggcgggtgtcggggctggcttaactatgcggcatcagagcagattgtactgagagtgcaccatatggacatattgtcgttagaacgcggctacaattaatacataaccttatgtatcatacacatacgatttaggtgacactatagaacggcgcgccaagcttggatcctagcctaagtacgtactcaaaatgccaacaaataaaaaaaaagttgctttaataatgccaaaacaaattaataaaacacttacaacaccggattttttttaattaaaatgtgccatttaggataaatagttaatatttttaataattatttaaaaagccgtatctactaaaatgatttttatttggttgaaaatattaatatgtttaaatcaacacaatctatcaaaattaaactaaaaaaaaaataagtgtacgtggttaacattagtacagtaatataagaggaaaatgagaaattaagaaattgaaagcgagtctaatttttaaattatgaacctgcatatataaaaggaaagaaagaatccaggaagaaaagaaatgaaaccatgcatggtcccctcgtcatcacgagtttctgccatttgcaatagaaacactgaaacacctttctctttgtcacttaattgagatgccgaagccacctcacaccatgaacttcatgaggtgtagcacccaaggcttccatagccatgcatactgaagaatgtctcaagctcagcaccctacttctgtgacgtgtccctcattcaccttcctctcttccctataaataaccacgcctcaggttctccgcttcacaactcaaacattctctccattggtccttaaacactcatcagtcatcaccatggaggtccgacgacgaaagatagacgtgctcaaggcccagaaaaacggctacgaatcgggcccaccatctcgacaatcgtcgcagccctcctcaagagcatcgtccagaacccgcaacaaacactcctcgtccaccctgtcgctcagcggactgaccatgaaagtccagaagaaacctgcgggacccccggcgaactccaaaacgccattcctacacatcaagcccgtgcacacgtgctgctccacatcaatgctttcgcgcgattatgacggctccaaccccagcttcaagggcttcaaaaacatcggcatgatcattctcattgtgggaaatctacggctcgcattcgaaaactacctcaaatacggcatttccaacccgttcttcgaccccaaaattactccttccgagtggcagctctcaggcttgctcatagtcgtggcctacgcacatatcctcatggcctacgctattgagagcgctgccaagctgctgttcctctctagcaaacaccactacatggccgtggggcttctgcataccatgaacactttgtcgtccatctcgttgctgtcctacgtcgtctactactacctgcccaaccccgtggcaggcacaatagtcgagtttgtggccgttattctgtctctcaaactcgcctcatacgccctcactaactcggatctccgaaaagccgcaattcatgcccagaagctcgacaagacgcaagacgataacgaaaaggaatccacctcgtcttcctcttcttcagatgacgcagagactttggcagacattgacgtcattcctgcatactacgcacagctgccctacccccagaatgtgacgctgtcgaacctgctgtacttctggtttgctcccacactggtctaccagcccgtgtaccccaagacggagcgtattcgacccaagcacgtgatccgaaacctgtttgagctcgtctctctgtgcatgcttattcagtttctcatcttccagtacgcctaccccatcatgcagtcgtgtctggctctgttcttccagcccaagctcgattatgccaacatctccgagcgcctcatgaagttggcctccgtgtctatgatggtctggctcattggattctacgctttcttccagaacggtctcaatcttattgccgagctcacctgttttggaaacagaaccttctaccagcagtggtggaattcccgctccattggccagtactggactctatggaacaagccagtcaaccagtactttagacaccacgtctacgtgcctcttctcgctcggggcatgtcgcggttcaatgcgtcggtggtggttttctttttctccgccgtcatccatgaactgcttgtcggcatccccactcacaacatcatcggagccgccttcttcggcatgatgtcgcaggtgcctctgatcatggctactgagaaccttcagcatattaactcctctctgggccccttccttggcaactgtgcattctggttcacctttttcctgggacaacccacttgtgcattcctttactatttggcctacaactacaagcagaaccagtagc

SEQ ID NO: 49 - DNA, 5280 bp, Artificial Sequence
  Plasmid pKS121/BS
  misc_feature (4090)..(4090): n is a, c, g, or t
ggccgccaccgcggtggagctccagcttttgttccctttagtgagggttaattgcgcgcttggcgtaatcatggtcatagctgtttcctgtgtgaaattgttatccgctcacaattccacacaacatacgagccggaagcataaagtgtaaagcctggggtgcctaatgagtgagctaactcacattaattgcgttgcgctcactgcccgctttccagtcgggaaacctgtcgtgccagctgcattaatgaatcggccaacgcgcggggagaggcggtttgcgtattgggcgctcttccgcttcctcgctcactgactcgctgcgctcggtcgttcggctgcggcgagcggtatcagctcactcaaaggcggtaatacggttatccacagaatcaggggataacgcaggaaagaacatgtgagcaaaaggccagcaaaaggccaggaaccgtaaaaaggccgcgttgctggcgtttttccataggctccgcccccctgacgagcatcacaaaaatcgacgctcaagtcagaggtggcgaaacccgacaggactataaagataccaggcgtttccccctggaagctccctcgtgcgctctcctgttccgaccctgccgcttaccggatacctgtccgcctttctcccttcgggaagcgtggcgctttctcatagctcacgctgtaggtatctcagttcggtgtaggtcgttcgctccaagctgggctgtgtgcacgaaccccccgttcagcccgaccgctgcgccttatccggtaactatcgtcttgagtccaacccggtaagacacgacttatcgccactggcagcagccactggtaacaggattagcagagcgaggtatgtaggcggtgctacagagttcttgaagtggtggcctaactacggctacactagaaggacagtatttggtatctgcgctctgctgaagccagttaccttcggaaaaagagttggtagctcttgatccggcaaacaaaccaccgctggtagcggtggtttttttgtttgcaagcagcagattacgcgcagaaaaaaaggatctcaagaagatcctttgatcttttctacggggtctgacgctcagtggaacgaaaactcacgttaagggattttggtcatgagattatcaaaaaggatcttcacctagatccttttaaattaaaaatgaagttttaaatcaatctaaagtatatatgagtaaacttggtctgacagttaccaatgcttaatcagtgaggcacctatctcagcgatctgtctatttcgttcatccatagttgcctgactccccgtcgtgtagataactacgatacgggagggcttaccatctggccccagtgctgcaatgataccgcgagacccacgctcaccggctccagatttatcagcaataaaccagccagccggaagggccgagcgcagaagtggtcctgcaactttatccgcctccatccagtctattaattgttgccgggaagctagagtaagtagttcgccagttaatagtttgcgcaacgttgttgccattgctacaggcatcgtggtgtcacgctcgtcgtttggtatggcttcattcagctccggttcccaacgatcaaggcgagttacatgatcccccatgttgtgcaaaaaagcggttagctccttcggtcctccgatcgttgtcagaagtaagttggccgcagtgttatcactcatggttatggcagcactgcataattctcttactgtcatgccatccgtaagatgcttttctgtgactggtgagtactcaaccaagtcattctgagaatagtgtatgcggcgaccgagttgctcttgcccggcgtcaatacgggataataccgcgccacatagcagaactttaaaagtgctcatcattggaaaacgttcttcggggcgaaaactctcaaggatcttaccgctgttgagatccagttcgatgtaacccactcgtgcacccaactgatcttcagcatcttttactttcaccagcgtttctgggtgagcaaaaacaggaaggcaaaatgccgcaaaaaagggaataagggcgacacggaaatgttgaatactcatactcttcctttttcaatattattgaagcatttatcagggttattgtctcatgagcggatacatatttgaatgtatttagaaaaataaacaaataggggttccgcgcacatttccccgaaaagtgccacctgacgcgccctgtagcggcgcattaagcgcggcgggtgtggtggttacgcgcagcgtgaccgctacacttgccagcgccctagcgcccgctcctttcgctttcttcccttcctttctcgccacgttcgccggctttccccgtcaagctctaaatcgggggctccctttagggttccgatttagtgctttacggcacctcgaccccaaaaaacttgattagggtgatggttcacgtagtgggccatcgccctgatagacggtttttcgccctttgacgttggagtccacgttctttaatagtggactcttgttccaaactggaacaacactcaaccctatctcggtctattcttttgatttataagggattttgccgatttcggcctattggttaaaaaatgagctgatttaacaaaaatttaacgcgaattttaacaaaatattaacgcttacaatttccattcgccattcaggctgcgcaactgttgggaagggcgatcggtgcgggcctcttcgctattacgccagctggcgaaagggggatgtgctgcaaggcgattaagttgggtaacgccagggttttcccagtcacgacgttgtaaaacgacggccagtgagcgcgcgtaatacgactcactatagggcgaattgggtaccgggccccccctcgaggtcgacggtatcgataagcttgatatcgaattcctgcagcccgggggatccactagttctagagcggcgcgccgtcgacggatataatgagccgtaaacaaagatgattaagtagtaattaatacgtactagtaaaagtggcaaaagataacgagaaagaaccaatttctttgcattcggccttagcggaaggcatatataagctttgattattttatttagtgtaatgatttcgtacaaccaaagcatttatttagtactctcacacttgtgtcgcggccgcttggggggctatggaagactttcttagttagttgtgtgaataagcaatgttgggagaatcgggactacttataggataggaataaaacagaaaagtattaagtgctaatgaaatatttagactgataattaaaatcttcacgtatgtccacttgatataaaaacgtcaggaataaaggaagtacagtagaatttaaaggtactctttttatatatacccgtgttctctttttggctagctagttgcataaaaaataatctatatttttatcattattttaaatatcttatgagatggtaaatatttatcataattttttttactattatttattatttgtgtgtgtaatacatatagaagttaattacaaattttatttactttttcattattttgatatgattcaccattaatttagtgttattatttataatagttcattttaatctttttgtatatattatgcgtgcagtacttttttcctacatataactactattacattttatttatataatatttttattaatgaattttcgtgataatatgtaatattgttcattattatttcagattttttaaaaatatttgtgttattatttatgaaatatgtaatttttttagtatttgattttatgatgataaagtgttctaaattcaaaagaagggggaaagcgtaaacattaaaaaacgtcatcaaacaaaaacaaaatcttgttaataaagataaaactgtttgttttgatcactgttatttcgtaatataaaaacattatttatatttatattgttgacaaccaaatttgcctatcaaatctaaccaatataatgcatgcgtggcaggtaatgtactaccatgaacttaagtcatgacataataaaccgtgaatctgaccaatgcatgtacctanctaaattgtatttgtgacacgaagcaaatgattcaattcacaatggagatgggaaacaaataatgaagaacccagaactaagaaagcttttctgaaaaataaaataaaggcaatgtcaaaagtatactgcatcatcagtccagaaagcacatgatatttttttatcagtatcaatgcagctagttttattttacaatatcgatatagctagtttaaatatattgcagctagatttataaatatttgtgttattatttatcatttgtgtaatcctgtttttagtattttagtttatatatgatgataatgtattccaaatttaaaagaagggaaataaatttaaacaagaaaaaaagtcatcaaacaaaaaacaaatgaaagggtggaaagatgttaccatgtaatgtgaatgttacagtatttcttttattatagagttaacaaattaactaatatgattttgttaataatgataaaatattttttttattattatttcataatataaaaatagtttacttaatataaaaaaaattctatcgttcacaacaaagttggccacctaatttaaccatgcatgtacccatggaccatattaggtaaccatcaaacctgatgaagagataaagagatgaagacttaagtcataacacaaaaccataaaaaacaaaaatacaatcaaccgtcaatctgaccaatgcatgaaaaagctgcaatagtgagtggcgacacaaagcacatgattttcttacaacggagataaaaccaaaaaaatatttcatgaacaacctagaacaaataaagcttttatataataaatatataaataaataaaggctatggaataatatacttcaatatatttggattaaataaattgttggcggggttgatatatttatacacacctaaagtcacttcaatctcattttcacttaacttttattttttttttctttttatttatcataaagagaatattgataatatactttttaacatatttttatgacattttttattggtgaaaacttattaaaaatcataaattttgtaagttagatttatttaaagagttcctcttcttattttaaattttttaataaatttttaaataactaaaatttgtgttaaaaatgttaaaaaagtgtgttattaacccttctcttcgaggatccaagcttggcgcg

SEQ ID NO: 50 - DNA, 5968 bp, Artificial Sequence
  Plasmid pDs-Red in pKS121/BS
  misc_feature (5052)..(5052): n is a, c, g, or t
catggcctcctccgaggacgtcatcaaggagttcatgcgcttcaaggtgcgcatggagggctccgtgaacggccacgagttcgagatcgagggcgagggcgagggccgcccctacgagggcacccagaccgccaagctgaaggtgaccaagggcggccccctgcccttcgcctgggacatcctgtccccccagttccagtacggctccaaggtgtacgtgaagcaccccgccgacatccccgactacaagaagctgtccttccccgagggcttcaagtgggagcgcgtgatgaacttcgaggacggcggcgtggtgaccgtgacccaggactcctccctgcaggacggctccttcatctacaaggtgaagttcatcggcgtgaacttcccctccgacggccccgtaatgcagaagaagactatgggctgggaggcctccaccgagcgcctgtacccccgcgacggcgtgctgaagggcgagatccacaaggccctgaagctgaaggacggcggccactacctggtggagttcaagtccatctacatggccaagaagcccgtgcagctgcccggctactactacgtggactccaagctggacatcacctcccacaacgaggactacaccatcgtggagcagtacgagcgcgccgagggccgccaccacctgttcctgtagcggccggccgcgacacaagtgtgagagtactaaataaatgctttggttgtacgaaatcattacactaaataaaataatcaaagcttatatatgccttccgctaaggccgaatgcaaagaaattggttctttctcgttatcttttgccacttttactagtacgtattaattactacttaatcatctttgtttacggctcattatatccgtcgacggcgcgccgctctagaactagtggatcccccgggctgcaggaattcgatatcaagcttatcgataccgtcgacctcgagggggggcccggtacccaattcgccctatagtgagtcgtattacgcgcgctcactggccgtcgttttacaacgtcgtgactgggaaaaccctggcgttacccaacttaatcgccttgcagcacatccccctttcgccagctggcgtaatagcgaagaggcccgcaccgatcgcccttcccaacagttgcgcagcctgaatggcgaatggaaattgtaagcgttaatattttgttaaaattcgcgttaaatttttgttaaatcagctcattttttaaccaataggccgaaatcggcaaaatcccttataaatcaaaagaatagaccgagatagggttgagtgttgttccagtttggaacaagagtccactattaaagaacgtggactccaacgtcaaagggcgaaaaaccgtctatcagggcgatggcccactacgtgaaccatcaccctaatcaagttttttggggtcgaggtgccgtaaagcactaaatcggaaccctaaagggagcccccgatttagagcttgacggggaaagccggcgaacgtggcgagaaaggaagggaagaaagcgaaaggagcgggcgctagggcgctggcaagtgtagcggtcacgctgcgcgtaaccaccacacccgccgcgcttaatgcgccgctacagggcgcgtcaggtggcacttttcggggaaatgtgcgcggaacccctatttgtttatttttctaaatacattcaaatatgtatccgctcatgagacaataaccctgataaatgcttcaataatattgaaaaaggaagagtatgagtattcaacatttccgtgtcgcccttattcccttttttgcggcattttgccttcctgtttttgctcacccagaaacgctggtgaaagtaaaagatgctgaagatcagttgggtgcacgagtgggttacatcgaactggatctcaacagcggtaagatccttgagagttttcgccccgaagaacgttttccaatgatgagcacttttaaagttctgctatgtggcgcggtattatcccgtattgacgccgggcaagagcaactcggtcgccgcatacactattctcagaatgacttggttgagtactcaccagtcacagaaaagcatcttacggatggcatgacagtaagagaattatgcagtgctgccataaccatgagtgataacactgcggccaacttacttctgacaacgatcggaggaccgaaggagctaaccgcttttttgcacaacatgggggatcatgtaactcgccttgatcgttgggaaccggagctgaatgaagccataccaaacgacgagcgtgacaccacgatgcctgtagcaatggcaacaacgttgcgcaaactattaactggcgaactacttactctagcttcccggcaacaattaatagactggatggaggcggataaagttgcaggaccacttctgcgctcggcccttccggctggctggtttattgctgataaatctggagccggtgagcgtgggtctcgcggtatcattgcagcactggggccagatggtaagccctcccgtatcgtagttatctacacgacggggagtcaggcaactatggatgaacgaaatagacagatcgctgagataggtgcctcactgattaagcattggtaactgtcagaccaagtttactcatatatactttagattgatttaaaacttcatttttaatttaaaaggatctaggtgaagatcctttttgataatctcatgaccaaaatcccttaacgtgagttttcgttccactgagcgtcagaccccgtagaaaagatcaaaggatcttcttgagatcctttttttctgcgcgtaatctgctgcttgcaaacaaaaaaaccaccgctaccagcggtggtttgtttgccggatcaagagctaccaactctttttccgaaggtaactggcttcagcagagcgcagataccaaatactgtccttctagtgtagccgtagttaggccaccacttcaagaactctgtagcaccgcctacatacctcgctctgctaatcctgttaccagtggctgctgccagtggcgataagtcgtgtcttaccgggttggactcaagacgatagttaccggataaggcgcagcggtcgggctgaacggggggttcgtgcacacagcccagcttggagcgaacgacctacaccgaactgagatacctacagcgtgagctatgagaaagcgccacgcttcccgaagggagaaaggcggacaggtatccggtaagcggcagggtcggaacaggagagcgcacgagggagcttccagggggaaacgcctggtatctttatagtcctgtcgggtttcgccacctctgacttgagcgtcgatttttgtgatgctcgtcaggggggcggagcctatggaaaaacgccagcaacgcggcctttttacggttcctggccttttgctggccttttgctcacatgttctttcctgcgttatcccctgattctgtggataaccgtattaccgcctttgagtgagctgataccgctcgccgcagccgaacgaccgagcgcagcgagtcagtgagcgaggaagcggaagagcgcccaatacgcaaaccgcctctccccgcgcgttggccgattcattaatgcagctggcacgacaggtttcccgactggaaagcgggcagtgagcgcaacgcaattaatgtgagttagctcactcattaggcaccccaggctttacactttatgcttccggctcgtatgttgtgtggaattgtgagcggataacaatttcacacaggaaacagctatgaccatgattacgccaagcgcgcaattaaccctcactaaagggaacaaaagctggagctccaccgcggtggcggcccgcgccaagcttggatcctcgaagagaagggttaataacacacttttttaacatttttaacacaaattttagttatttaaaaatttattaaaaaatttaaaataagaagaggaactctttaaataaatctaacttacaaaatttatgatttttaataagttttcaccaataaaaaatgtcataaaaatatgttaaaaagtatattatcaatattctctttatgataaataaaaagaaaaaaaaaataaaagttaagtgaaaatgagattgaagtgactttaggtgtgtataaatatatcaaccccgccaacaatttatttaatccaaatatattgaagtatattattccatagcctttatttatttatatatttattatataaaagctttatttgttctaggttgttcatgaaatatttttttggttttatctccgttgtaagaaaatcatgtgctttgtgtcgccactcactattgcagctttttcatgcattggtcagattgacggttgattgtatttttgttttttatggttttgtgttatgacttaagtcttcatctctttatctcttcatcaggtttgatggttacctaatatggtccatgggtacatgcatggttaaattaggtggccaactttgttgtgaacgatagaattttttttatattaagtaaactatttttatattatgaaataataataaaaaaaatattttatcattattaacaaaatcatattagttaatttgttaactctataataaaagaaatactgtaacattcacattacatggtaacatctttccaccctttcatttgttttttgtttgatgactttttttcttgtttaaatttatttcccttcttttaaatttggaatacattatcatcatatataaactaaaatactaaaaacaggattacacaaatgataaataataacacaaatatttataaatctagctgcaatatatttaaactagctatatcgatattgtaaaataaaactagctgcattgatactgataaaaaaatatcatgtgctttctggactgatgatgcagtatacttttgacattgcctttattttatttttcagaaaagctttcttagttctgggttcttcattatttgtttcccatctccattgtgaattgaatcatttgcttcgtgtcacaaatacaatttagntaggtacatgcattggtcagattcacggtttattatgtcatgacttaagttcatggtagtacattacctgccacgcatgcattatattggttagatttgataggcaaatttggttgtcaacaatataaatataaataatgtttttatattacgaaataacagtgatcaaaacaaacagttttatctttattaacaagattttgtttttgtttgatgacgttttttaatgtttacgctttcccccttcttttgaatttagaacactttatcatcataaaatcaaatactaaaaaaattacatatttcataaataataacacaaatatttttaaaaaatctgaaataataatgaacaatattacatattatcacgaaaattcattaataaaaatattatataaataaaatgtaatagtagttatatgtaggaaaaaagtactgcacgcataatatatacaaaaagattaaaatgaactattataaataataacactaaattaatggtgaatcatatcaaaataatgaaaaagtaaataaaatttgtaattaacttctatatgtattacacacacaaataataaataatagtaaaaaaaattatgataaatatttaccatctcataagatatttaaaataatgataaaaatatagattattttttatgcaactagctagccaaaaagagaacacgggtatatataaaaagagtacctttaaattctactgtacttcctttattcctgacgtttttatatcaagtggacatacgtgaagattttaattatcagtctaaatatttcattagcacttaatacttttctgttttattcctatcctataagtagtcccgattctcccaacattgcttattcacacaactaactaagaaagtcttccatagccccccaagcggcc

SEQ ID NO: 51 - DNA, 10058 bp, Artificial Sequence
  Plasmid pKS332
  misc_feature (1178)..(1178): n is a, c, g, or t
gatcctcgaagagaagggttaataacacacttttttaacatttttaacacaaattttagttatttaaaaatttattaaaaaatttaaaataagaagaggaactctttaaataaatctaacttacaaaatttatgatttttaataagttttcaccaataaaaaatgtcataaaaatatgttaaaaagtatattatcaatattctctttatgataaataaaaagaaaaaaaaaataaaagttaagtgaaaatgagattgaagtgactttaggtgtgtataaatatatcaaccccgccaacaatttatttaatccaaatatattgaagtatattattccatagcctttatttatttatatatttattatataaaagctttatttgttctaggttgttcatgaaatatttttttggttttatctccgttgtaagaaaatcatgtgctttgtgtcgccactcactattgcagctttttcatgcattggtcagattgacggttgattgtatttttgttttttatggttttgtgttatgacttaagtcttcatctctttatctcttcatcaggtttgatggttacctaatatggtccatgggtacatgcatggttaaattaggtggccaactttgttgtgaacgatagaattttttttatattaagtaaactatttttatattatgaaataataataaaaaaaatattttatcattattaacaaaatcatattagttaatttgttaactctataataaaagaaatactgtaacattcacattacatggtaacatctttccaccctttcatttgttttttgtttgatgactttttttcttgtttaaatttatttcccttcttttaaatttggaatacattatcatcatatataaactaaaatactaaaaacaggattacacaaatgataaataataacacaaatatttataaatctagctgcaatatatttaaactagctatatcgatattgtaaaataaaactagctgcattgatactgataaaaaaatatcatgtgctttctggactgatgatgcagtatacttttgacattgcctttattttatttttcagaaaagctttcttagttctgggttcttcattatttgtttcccatctccattgtgaattgaatcatttgcttcgtgtcacaaatacaatttagntaggtacatgcattggtcagattcacggtttattatgtcatgacttaagttcatggtagtacattacctgccacgcatgcattatattggttagatttgataggcaaatttggttgtcaacaatataaatataaataatgtttttatattacgaaataacagtgatcaaaacaaacagttttatctttattaacaagattttgtttttgtttgatgacgttttttaatgtttacgctttcccccttcttttgaatttagaacactttatcatcataaaatcaaatactaaaaaaattacatatttcataaataataacacaaatatttttaaaaaatctgaaataataatgaacaatattacatattatcacgaaaattcattaataaaaatattatataaataaaatgtaatagtagttatatgtaggaaaaaagtactgcacgcataatatatacaaaaagattaaaatgaactattataaataataacactaaattaatggtgaatcatatcaaaataatgaaaaagtaaataaaatttgtaattaacttctatatgtattacacacacaaataataaataatagtaaaaaaaattatgataaatatttaccatctcataagatatttaaaataatgataaaaatatagattattttttatgcaactagctagccaaaaagagaacacgggtatatataaaaagagtacctttaaattctactgtacttcctttattcctgacgtttttatatcaagtggacatacgtgaagattttaattatcagtctaaatatttcattagcacttaatacttttctgttttattcctatcctataagtagtcccgattctcccaacattgcttattcacacaactaactaagaaagtcttccatagccccccaagcggcccatggcctcctccgaggacgtcatcaaggagttcatgcgcttcaaggtgcgcatggagggctccgtgaacggccacgagttcgagatcgagggcgagggcgagggccgcccctacgagggcacccagaccgccaagctgaaggtgaccaagggcggccccctgcccttcgcctgggacatcctgtccccccagttccagtacggctccaaggtgtacgtgaagcaccccgccgacatccccgactacaagaagctgtccttccccgagggcttcaagtgggagcgcgtgatgaacttcgaggacggcggcgtggtgaccgtgacccaggactcctccctgcaggacggctccttcatctacaaggtgaagttcatcggcgtgaacttcccctccgacggccccgtaatgcagaagaagactatgggctgggaggcctccaccgagcgcctgtacccccgcgacggcgtgctgaagggcgagatccacaaggccctgaagctgaaggacggcggccactacctggtggagttcaagtccatctacatggccaagaagcccgtgcagctgcccggctactactacgtggactccaagctggacatcacctcccacaacgaggactacaccatcgtggagcagtacgagcgcgccgagggccgccaccacctgttcctgtagcggccggccgcgacacaagtgtgagagtactaaataaatgctttggttgtacgaaatcattacactaaataaaataatcaaagcttatatatgccttccgctaaggccgaatgcaaagaaattggttctttctcgttatcttttgccacttttactagtacgtattaattactacttaatcatctttgtttacggctcattatatccgtcgacggcgcgccgctctagaactagtggatccgtcgacggcgcgcccgatcatccggatatagttcctcctttcagcaaaaaacccctcaagacccgtttagaggccccaaggggttatgctagttattgctcagcggtggcagcagccaactcagcttcctttcgggctttgttagcagccggatcgatccaagctgtacctcactattcctttgccctcggacgagtgctggggcgtcggtttccactatcggcgagtacttctacacagccatcggtccagacggccgcgcttctgcgggcgatttgtgtacgcccgacagtcccggctccggatcggacgattgcgtcgcatcgaccctgcgcccaagctgcatcatcgaaattgccgtcaaccaagctctgatagagttggtcaagaccaatgcggagcatatacgcccggagccgcggcgatcctgcaagctccggatgcctccgctcgaagtagcgcgtctgctgctccatacaagccaaccacggcctccagaagaagatgttggcgacctcgtattgggaatccccgaacatcgcctcgctccagtcaatgaccgctgttatgcggccattgtccgtcaggacattgttggagccgaaatccgcgtgcacgaggtgccggacttcggggcagtcctcggcccaaagcatcagctcatcgagagcctgcgcgacggacgcactgacggtgtcgtccatcacagtttgccagtgatacacatggggatcagcaatcgcgcatatgaaatcacgccatgtagtgtattgaccgattccttgcggtccgaatgggccgaacccgctcgtctggctaagatcggccgcagcgatcgcatccatagcctccgcgaccggctgcagaacagcgggcagttcggtttcaggcaggtcttgcaacgtgacaccctgtgcacggcgggagatgcaataggtcaggctctcgctgaattccccaatgtcaagcacttccggaatcgggagcgcggccgatgcaaagtgccgataaacataacgatctttgtagaaaccatcggcgcagctatttacccgcaggacatatccacgccctcctacatcgaagctgaaagcacgagattcttcgccctccgagagctgcatcaggtcggagacgctgtcgaacttttcgatcagaaacttctcgacagacgtcgcggtgagttcaggcttttccatgggtatatctccttcttaaagttaaacaaaattatttctagagggaaaccgttgtggtctccctatagtgagtcgtattaatttcgcgggatcgagatcgatccaattccaatcccacaaaaatctgagcttaacagcacagttgctcctctcagagcagaatcgggtattcaacaccctcatatcaactactacgttgtgtataacggtccacatgccggtatatacgatgactggggttgtacaaaggcggcaacaaacggcgttcccggagttgcacacaagaaatttgccactattacagaggcaagagcagcagctgacgcgtacacaacaagtcagcaaacagacaggttgaacttcatccccaaaggagaagctcaactcaagcccaagagctttgctaaggccctaacaagcccaccaaagcaaaaagcccactggctcacgctaggaaccaaaaggcccagcagtgatccagccccaaaagagatctcctttgccccggagattacaatggacgatttcctctatctttacgatctaggaaggaagttcgaaggtgaaggtgacgacactatgttcaccactgataatgagaaggttagcctcttcaatttcagaaagaatgctgacccacagatggttagagaggcctacgcagcaggtctcatcaagacgatctacccgagtaacaatctccaggagatcaaataccttcccaagaaggttaaagatgcagtcaaaagattcaggactaattgcatcaagaacacagagaaagacatatttctcaagatcagaagtactattccagtatggacgattcaaggcttgcttcataaaccaaggcaagtaatagagattggagtctctaaaaaggtagttcctactgaatctaaggccatgcatggagtctaagattcaaatcgaggatctaacagaactcgccgtgaagactggcgaacagttcatacagagtcttttacgactcaatgacaagaagaaaatcttcgtcaacatggtggagcacgacactctggtctactccaaaaatgtcaaagatacagtctcagaagaccaaagggctattgagacttttcaacaaaggataatttcgggaaacctcctcggattccattgcccagctatctgtcacttcatcgaaaggacagtagaaaaggaaggtggctcctacaaatgccatcattgcgataaaggaaaggctatcattcaagatgcctctgccgacagtggtcccaaagatggacccccacccacgaggagcatcgtggaaaaagaagacgttccaaccacgtcttcaaagcaagtggattgatgtgacatctccactgacgtaagggatgacgcacaatcccactatccttcgcaagacccttcctctatataaggaagttcatttcatttggagaggacacgctcgagctcatttctctattacttcagccataacaaaagaactcttttctcttcttattaaaccatgaaaaagcctgaactcaccgcgacgtctgtcgagaagtttctgatcgaaaagttcgacagcgtctccgacctgatgcagctctcggagggcgaagaatctcgtgctttcagcttcgatgtaggagggcgtggatatgtcctgcgggtaaatagctgcgccgatggtttctacaaagatcgttatgtttatcggcactttgcatcggccgcgctcccgattccggaagtgcttgacattggggaattcagcgagagcctgacctattgcatctcccgccgtgcacagggtgtcacgttgcaagacctgcctgaaaccgaactgcccgctgttctgcagccggtcgcggaggccatggatgcgatcgctgcggccgatcttagccagacgagcgggttcggcccattcggaccgcaaggaatcggtcaatacactacatggcgtgatttcatatgcgcgattgctgatccccatgtgtatcactggcaaactgtgatggacgacaccgtcagtgcgtccgtcgcgcaggctctcgatgagctgatgctttgggccgaggactgccccgaagtccggcacctcgtgcacgcggatttcggctccaacaatgtcctgacggacaatggccgcataacagcggtcattgactggagcgaggcgatgttcggggattcccaatacgaggtcgccaacatcttcttctggaggccgtggttggcttgtatggagcagcagacgcgctacttcgagcggaggcatccggagcttgcaggatcgccgcggctccgggcgtatatgctccgcattggtcttgaccaactctatcagagcttggttgacggcaatttcgatgatgcagcttgggcgcagggtcgatgcgacgcaatcgtccgatccggagccgggactgtcgggcgtacacaaatcgcccgcagaagcgcggccgtctggaccgatggctgtgtagaagtactcgccgatagtggaaaccgacgccccagcactcgtccgagggcaaaggaatagtgaggtacctaaagaaggagtgcgtcgaagcagatcgttcaaacatttggcaataaagtttcttaagattgaatcctgttgccggtcttgcgatgattatcatataatttctgttgaattacgttaagcatgtaataattaacatgtaatgcatgacgttatttatgagatgggtttttatgattagagtcccgcaattatacatttaatacgcgatagaaaacaaaatatagcgcgcaaactaggataaattatcgcgcgcggtgtcatctatgttactagatcgatgtcgaatctgatcaacctgcattaatgaatcggccaacgcgcggggagaggcggtttgcgtattgggcgctcttccgcttcctcgctcactgactcgctgcgctcggtcgttcggctgcggcgagcggtatcagctcactcaaaggcggtaatacggttatccacagaatcaggggataacgcaggaaagaacatgtgagcaaaaggccagcaaaaggccaggaaccgtaaaaaggccgcgttgctggcgtttttccataggctccgcccccctgacgagcatcacaaaaatcgacgctcaagtcagaggtggcgaaacccgacaggactataaagataccaggcgtttccccctggaagctccctcgtgcgctctcctgttccgaccctgccgcttaccggatacctgtccgcctttctcccttcgggaagcgtggcgctttctcaatgctcacgctgtaggtatctcagttcggtgtaggtcgttcgctccaagctgggctgtgtgcacgaaccccccgttcagcccgaccgctgcgccttatccggtaactatcgtcttgagtccaacccggtaagacacgacttatcgccactggcagcagccactggtaacaggattagcagagcgaggtatgtaggcggtgctacagagttcttgaagtggtggcctaactacggctacactagaaggacagtatttggtatctgcgctctgctgaagccagttaccttcggaaaaagagttggtagctcttgatccggcaaacaaaccaccgctggtagcggtggtttttttgtttgcaagcagcagattacgcgcagaaaaaaaggatctcaagaagatcctttgatcttttctacggggtctgacgctcagtggaacgaaaactcacgttaagggattttggtcatgacattaacctataaaaataggcgtatcacgaggccctttcgtctcgcgcgtttcggtgatgacggtgaaaacctctgacacatgcagctcccggagacggtcacagcttgtctgtaagcggatgccgggagcagacaagcccgtcagggcgcgtcagcgggtgttggcgggtgtcggggctggcttaactatgcggcatcagagcagattgtactgagagtgcaccatatggacatattgtcgttagaacgcggctacaattaatacataaccttatgtatcatacacatacgatttaggtgacactatagaacggcgcgccaagcttttgatccatgcccttcatttgccgcttattaattaatttggtaacagtccgtactaatcagttacttatccttcccccatcataattaatcttggtagtctcgaatgccacaacactgactagtctcttggatcataagaaaaagccaaggaacaaaagaagacaaaacacaatgagagtatcctttgcatagcaatgtctaagttcataaaattcaaacaaaaacgcaatcacacacagtggacatcacttatccactagctgatcaggatcgccgcgtcaagaaaaaaaaactggaccccaaaagccatgcacaacaacacgtactcacaaaggtgtcaatcgagcagcccaaaacattcaccaactcaacccatcatgagccctcacatttgttgtttctaacccaacctcaaactcgtattctcttccgccacctcatttttgtttatttcaacacccgtcaaactgcatgccaccccgtggccaaatgtccatgcatgttaacaagacctatgactataaatagctgcaatctcggcccaggttttcatcatcaagaaccagttcaatatcctagtacaccgtattaaagaatttaagatatactgcggccgcaagtatgaactaaaatgcatgtaggtgtaagagctcatggagagcatggaatattgtatccgaccatgtaacagtataataactgagctccatctcacttcttctatgaataaacaaaggatgttatgatatattaacactctatctatgcaccttattgttctatgataaatttcctcttattattataaatcatctgaatcgtgacggcttatggaatgcttcaaatagtacaaaaacaaatgtgtactataagactttctaaacaattctaaccttagcattgtgaacgagacataagtgttaagaagacataacaattataatggaagaagtttgtctccatttatatattatatattacccacttatgtattatattaggatgttaaggagacataacaattataaagagagaagtttgtatccatttatatattatatactacccatttatatattatacttatccacttatttaatgtctttataaggtttgatccatgatatttctaatattttagttgatatgtatatgaaagggtactatttgaactctcttactctgtataaaggttggatcatccttaaagtgggtctatttaattttattgcttcttacagataaaaaaaaaattatgagttggtttgataaaatattgaaggatttaaaataataataaataacatataatatatgtatataaatttattataatataacatttatctataaaaaagtaaatattgtcataaatctatacaatcgtttagccttgctggacgaatctcaattatttaaacgagagtaaacatatttgactttttggttatttaacaaattattatttaacactatatgaaatttttttttttatcagcaaagaataaaattaaattaagaaggacaatggtgtcccaatccttatacaaccaacttccacaagaaagtcaagtcagagacaacaaaaaaacaagcaaaggaaattttttaatttgagttgtcttgtttgctgcataatttatgcagtaaaacactacacataacccttttagcagtagagcaatggttgaccgtgtgcttagcttcttttattttatttttttatcagcaaagaataaataaaataaaatgagacacttcagggatgtttcaacaagcttg

SEQ ID NO: 52 - DNA, 11611 bp, Artificial Sequence
  Plasmid pKS362
  misc_feature (2349)..(2349): n is a, c, g, or t
ggccgcaagtatgaactaaaatgcatgtaggtgtaagagctcatggagagcatggaatattgtatccgaccatgtaacagtataataactgagctccatctcacttcttctatgaataaacaaaggatgttatgatatattaacactctatctatgcaccttattgttctatgataaatttcctcttattattataaatcatctgaatcgtgacggcttatggaatgcttcaaatagtacaaaaacaaatgtgtactataagactttctaaacaattctaaccttagcattgtgaacgagacataagtgttaagaagacataacaattataatggaagaagtttgtctccatttatatattatatattacccacttatgtattatattaggatgttaaggagacataacaattataaagagagaagtttgtatccatttatatattatatactacccatttatatattatacttatccacttatttaatgtctttataaggtttgatccatgatatttctaatattttagttgatatgtatatgaaagggtactatttgaactctcttactctgtataaaggttggatcatccttaaagtgggtctatttaattttattgcttcttacagataaaaaaaaaattatgagttggtttgataaaatattgaaggatttaaaataataataaataacatataatatatgtatataaatttattataatataacatttatctataaaaaagtaaatattgtcataaatctatacaatcgtttagccttgctggacgaatctcaattatttaaacgagagtaaacatatttgactttttggttatttaacaaattattatttaacactatatgaaatttttttttttatcagcaaagaataaaattaaattaagaaggacaatggtgtcccaatccttatacaaccaacttccacaagaaagtcaagtcagagacaacaaaaaaacaagcaaaggaaattttttaatttgagttgtcttgtttgctgcataatttatgcagtaaaacactacacataacccttttagcagtagagcaatggttgaccgtgtgcttagcttcttttattttatttttttatcagcaaagaataaataaaataaaatgagacacttcagggatgtttcaacaagcttggatcctcgaagagaagggttaataacacacttttttaacatttttaacacaaattttagttatttaaaaatttattaaaaaatttaaaataagaagaggaactctttaaataaatctaacttacaaaatttatgatttttaataagttttcaccaataaaaaatgtcataaaaatatgttaaaaagtatattatcaatattctctttatgataaataaaaagaaaaaaaaaataaaagttaagtgaaaatgagattgaagtgactttaggtgtgtataaatatatcaaccccgccaacaatttatttaatccaaatatattgaagtatattattccatagcctttatttatttatatatttattatataaaagctttatttgttctaggttgttcatgaaatatttttttggttttatctccgttgtaagaaaatcatgtgctttgtgtcgccactcactattgcagctttttcatgcattggtcagattgacggttgattgtatttttgttttttatggttttgtgttatgacttaagtcttcatctctttatctcttcatcaggtttgatggttacctaatatggtccatgggtacatgcatggttaaattaggtggccaactttgttgtgaacgatagaattttttttatattaagtaaactatttttatattatgaaataataataaaaaaaatattttatcattattaacaaaatcatattagttaatttgttaactctataataaaagaaatactgtaacattcacattacatggtaacatctttccaccctttcatttgttttttgtttgatgactttttttcttgtttaaatttatttcccttcttttaaatttggaatacattatcatcatatataaactaaaatactaaaaacaggattacacaaatgataaataataacacaaatatttataaatctagctgcaatatatttaaactagctatatcgatattgtaaaataaaactagctgcattgatactgataaaaaaatatcatgtgctttctggactgatgatgcagtatacttttgacattgcctttattttatttttcagaaaagctttcttagttctgggttcttcattatttgtttcccatctccattgtgaattgaatcatttgcttcgtgtcacaaatacaatttagntaggtacatgcattggtcagattcacggtttattatgtcatgacttaagttcatggtagtacattacctgccacgcatgcattatattggttagatttgataggcaaatttggttgtcaacaatataaatataaataatgtttttatattacgaaataacagtgatcaaaacaaacagttttatctttattaacaagattttgtttttgtttgatgacgttttttaatgtttacgctttcccccttcttttgaatttagaacactttatcatcataaaatcaaatactaaaaaaattacatatttcataaataataacacaaatatttttaaaaaatctgaaataataatgaacaatattacatattatcacgaaaattcattaataaaaatattatataaataaaatgtaatagtagttatatgtaggaaaaaagtactgcacgcataatatatacaaaaagattaaaatgaactattataaataataacactaaattaatggtgaatcatatcaaaataatgaaaaagtaaataaaatttgtaattaacttctatatgtattacacacacaaataataaataatagtaaaaaaaattatgataaatatttaccatctcataagatatttaaaataatgataaaaatatagattattttttatgcaactagctagccaaaaagagaacacgggtatatataaaaagagtacctttaaattctactgtacttcctttattcctgacgtttttatatcaagtggacatacgtgaagattttaattatcagtctaaatatttcattagcacttaatacttttctgttttattcctatcctataagtagtcccgattctcccaacattgcttattcacacaactaactaagaaagtcttccatagccccccaagcggcccatggcctcctccgaggacgtcatcaaggagttcatgcgcttcaaggtgcgcatggagggctccgtgaacggccacgagttcgagatcgagggcgagggcgagggccgcccctacgagggcacccagaccgccaagctgaaggtgaccaagggcggccccctgcccttcgcctgggacatcctgtccccccagttccagtacggctccaaggtgtacgtgaagcaccccgccgacatccccgactacaagaagctgtccttccccgagggcttcaagtgggagcgcgtgatgaacttcgaggacggcggcgtggtgaccgtgacccaggactcctccctgcaggacggctccttcatctacaaggtgaagttcatcggcgtgaacttcccctccgacggccccgtaatgcagaagaagactatgggctgggaggcctccaccgagcgcctgtacccccgcgacggcgtgctgaagggcgagatccacaaggccctgaagctgaaggacggcggccactacctggtggagttcaagtccatctacatggccaagaagcccgtgcagctgcccggctactactacgtggactccaagctggacatcacctcccacaacgaggactacaccatcgtggagcagtacgagcgcgccgagggccgccaccacctgttcctgtagcggccggccgcgacacaagtgtgagagtactaaataaatgctttggttgtacgaaatcattacactaaataaaataatcaaagcttatatatgccttccgctaaggccgaatgcaaagaaattggttctttctcgttatcttttgccacttttactagtacgtattaattactacttaatcatctttgtttacggctcattatatccgtcgacggcgcgccgctctagaactagtggatccgtcgacggcgcgcccgatcatccggatatagttcctcctttcagcaaaaaacccctcaagacccgtttagaggccccaaggggttatgctagttattgctcagcggtggcagcagccaactcagcttcctttcgggctttgttagcagccggatcgatccaagctgtacctcactattcctttgccctcggacgagtgctggggcgtcggtttccactatcggcgagtacttctacacagccatcggtccagacggccgcgcttctgcgggcgatttgtgtacgcccgacagtcccggctccggatcggacgattgcgtcgcatcgaccctgcgcccaagctgcatcatcgaaattgccgtcaaccaagctctgatagagttggtcaagaccaatgcggagcatatacgcccggagccgcggcgatcctgcaagctccggatgcctccgctcgaagtagcgcgtctgctgctccatacaagccaaccacggcctccagaagaagatgttggcgacctcgtattgggaatccccgaacatcgcctcgctccagtcaatgaccgctgttatgcggccattgtccgtcaggacattgttggagccgaaatccgcgtgcacgaggtgccggacttcggggcagtcctcggcccaaagcatcagctcatcgagagcctgcgcgacggacgcactgacggtgtcgtccatcacagtttgccagtgatacacatggggatcagcaatcgcgcatatgaaatcacgccatgtagtgtattgaccgattccttgcggtccgaatgggccgaacccgctcgtctggctaagatcggccgcagcgatcgcatccatagcctccgcgaccggctgcagaacagcgggcagttcggtttcaggcaggtcttgcaacgtgacaccctgtgcacggcgggagatgcaataggtcaggctctcgctgaattccccaatgtcaagcacttccggaatcgggagcgcggccgatgcaaagtgccgataaacataacgatctttgtagaaaccatcggcgcagctatttacccgcaggacatatccacgccctcctacatcgaagctgaaagcacgagattcttcgccctccgagagctgcatcaggtcggagacgctgtcgaacttttcgatcagaaacttctcgacagacgtcgcggtgagttcaggcttttccatgggtatatctccttcttaaagttaaacaaaattatttctagagggaaaccgttgtggtctccctatagtgagtcgtattaatttcgcgggatcgagatcgatccaattccaatcccacaaaaatctgagcttaacagcacagttgctcctctcagagcagaatcgggtattcaacaccctcatatcaactactacgttgtgtataacggtccacatgccggtatatacgatgactggggttgtacaaaggcggcaacaaacggcgttcccggagttgcacacaagaaatttgccactattacagaggcaagagcagcagctgacgcgtacacaacaagtcagcaaacagacaggttgaacttcatccccaaaggagaagctcaactcaagcccaagagctttgctaaggccctaacaagcccaccaaagcaaaaagcccactggctcacgctaggaaccaaaaggcccagcagtgatccagccccaaaagagatctcctttgccccggagattacaatggacgatttcctctatctttacgatctaggaaggaagttcgaaggtgaaggtgacgacactatgttcaccactgataatgagaaggttagcctcttcaatttcagaaagaatgctgacccacagatggttagagaggcctacgcagcaggtctcatcaagacgatctacccgagtaacaatctccaggagatcaaataccttcccaagaaggttaaagatgcagtcaaaagattcaggactaattgcatcaagaacacagagaaagacatatttctcaagatcagaagtactattccagtatggacgattcaaggcttgcttcataaaccaaggcaagtaatagagattggagtctctaaaaaggtagttcctactgaatctaaggccatgcatggagtctaagattcaaatcgaggatctaacagaactcgccgtgaagactggcgaacagttcatacagagtcttttacgactcaatgacaagaagaaaatcttcgtcaacatggtggagcacgacactctggtctactccaaaaatgtcaaagatacagtctcagaagaccaaagggctattgagacttttcaacaaaggataatttcgggaaacctcctcggattccattgcccagctatctgtcacttcatcgaaaggacagtagaaaaggaaggtggctcctacaaatgccatcattgcgataaaggaaaggctatcattcaagatgcctctgccgacagtggtcccaaagatggacccccacccacgaggagcatcgtggaaaaagaagacgttccaaccacgtcttcaaagcaagtggattgatgtgacatctccactgacgtaagggatgacgcacaatcccactatccttcgcaagacccttcctctatataaggaagttcatttcatttggagaggacacgctcgagctcatttctctattacttcagccataacaaaagaactcttttctcttcttattaaaccatgaaaaagcctgaactcaccgcgacgtctgtcgagaagtttctgatcgaaaagttcgacagcgtctccgacctgatgcagctctcggagggcgaagaatctcgtgctttcagcttcgatgtaggagggcgtggatatgtcctgcgggtaaatagctgcgccgatggtttctacaaagatcgttatgtttatcggcactttgcatcggccgcgctcccgattccggaagtgcttgacattggggaattcagcgagagcctgacctattgcatctcccgccgtgcacagggtgtcacgttgcaagacctgcctgaaaccgaactgcccgctgttctgcagccggtcgcggaggccatggatgcgatcgctgcggccgatcttagccagacgagcgggttcggcccattcggaccgcaaggaatcggtcaatacactacatggcgtgatttcatatgcgcgattgctgatccccatgtgtatcactggcaaactgtgatggacgacaccgtcagtgcgtccgtcgcgcaggctctcgatgagctgatgctttgggccgaggactgccccgaagtccggcacctcgtgcacgcggatttcggctccaacaatgtcctgacggacaatggccgcataacagcggtcattgactggagcgaggcgatgttcggggattcccaatacgaggtcgccaacatcttcttctggaggccgtggttggcttgtatggagcagcagacgcgctacttcgagcggaggcatccggagcttgcaggatcgccgcggctccgggcgtatatgctccgcattggtcttgaccaactctatcagagcttggttgacggcaatttcgatgatgcagcttgggcgcagggtcgatgcgacgcaatcgtccgatccggagccgggactgtcgggcgtacacaaatcgcccgcagaagcgcggccgtctggaccgatggctgtgtagaagtactcgccgatagtggaaaccgacgccccagcactcgtccgagggcaaaggaatagtgaggtacctaaagaaggagtgcgtcgaagcagatcgttcaaacatttggcaataaagtttcttaagattgaatcctgttgccggtcttgcgatgattatcatataatttctgttgaattacgttaagcatgtaataattaacatgtaatgcatgacgttatttatgagatgggtttttatgattagagtcccgcaattatacatttaatacgcgatagaaaacaaaatatagcgcgcaaactaggataaattatcgcgcgcggtgtcatctatgttactagatcgatgtcgaatctgatcaacctgcattaatgaatcggccaacgcgcggggagaggcggtttgcgtattgggcgctcttccgcttcctcgctcactgactcgctgcgctcggtcgttcggctgcggcgagcggtatcagctcactcaaaggcggtaatacggttatccacagaatcaggggataacgcaggaaagaacatgtgagcaaaaggccagcaaaaggccaggaaccgtaaaaaggccgcgttgctggcgtttttccataggctccgcccccctgacgagcatcacaaaaatcgacgctcaagtcagaggtggcgaaacccgacaggactataaagataccaggcgtttccccctggaagctccctcgtgcgctctcctgttccgaccctgccgcttaccggatacctgtccgcctttctcccttcgggaagcgtggcgctttctcaatgctcacgctgtaggtatctcagttcggtgtaggtcgttcgctccaagctgggctgtgtgcacgaaccccccgttcagcccgaccgctgcgccttatccggtaactatcgtcttgagtccaacccggtaagacacgacttatcgccactggcagcagccactggtaacaggattagcagagcgaggtatgtaggcggtgctacagagttcttgaagtggtggcctaactacggctacactagaaggacagtatttggtatctgcgctctgctgaagccagttaccttcggaaaaagagttggtagctcttgatccggcaaacaaaccaccgctggtagcggtggtttttttgtttgcaagcagcagattacgcgcagaaaaaaaggatctcaagaagatcctttgatcttttctacggggtctgacgctcagtggaacgaaaactcacgttaagggattttggtcatgacattaacctataaaaataggcgtatcacgaggccctttcgtctcgcgcgtttcggtgatgacggtgaaaacctctgacacatgcagctcccggagacggtcacagcttgtctgtaagcggatgccgggagcagacaagcccgtcagggcgcgtcagcgggtgttggcgggtgtcggggctggcttaactatgcggcatcagagcagattgtactgagagtgcaccatatggacatattgtcgttagaacgcggctacaattaatacataaccttatgtatcatacacatacgatttaggtgacactatagaacggcgcgccaagcttttgatccatgcccttcatttgccgcttattaattaatttggtaacagtccgtactaatcagttacttatccttcccccatcataattaatcttggtagtctcgaatgccacaacactgactagtctcttggatcataagaaaaagccaaggaacaaaagaagacaaaacacaatgagagtatcctttgcatagcaatgtctaagttcataaaattcaaacaaaaacgcaatcacacacagtggacatcacttatccactagctgatcaggatcgccgcgtcaagaaaaaaaaactggaccccaaaagccatgcacaacaacacgtactcacaaaggtgtcaatcgagcagcccaaaacattcaccaactcaacccatcatgagccctcacatttgttgtttctaacccaacctcaaactcgtattctcttccgccacctcatttttgtttatttcaacacccgtcaaactgcatgccaccccgtggccaaatgtccatgcatgttaacaagacctatgactataaatagctgcaatctcggcccaggttttcatcatcaagaaccagttcaatatcctagtacaccgtattaaagaatttaagatatactgcggccgcatgactatcgactcacaatactacaagtcgcgagacaaaaacgacacggcacccaaaatcgcgggaatccgatatgccccgctatcgacaccattactcaaccgatgtgagaccttctctctggtctggcacattttcagcattcccactttcctcacaattttcatgctatgctgcgcaattccactgctctggccatttgtgattgcgtatgtagtgtacgctgttaaagacgactccccgtccaacggaggagtggtcaagcgatactcgcctatttcaagaaacttcttcatctggaagctctttggccgctacttccccataactctgcacaagacggtggatctggagcccacgcacacatactaccctctggacgtccaggagtatcacctgattgctgagagatactggccgcagaacaagtacctccgagcaatcatctccaccatcgagtactttctgcccgccttcatgaaacggtctctttctatcaacgagcaggagcagcctgccgagcgagatcctctcctgtctcccgtttctcccagctctccgggttctcaacctgacaagtggattaaccacgacagcagatatagccgtggagaatcatctggctccaacggccacgcctcgggctccgaacttaacggcaacggcaacaatggcaccactaaccgacgacctttgtcgtccgcctctgctggctccactgcatctgattccacgcttcttaacgggtccctcaactcctacgccaaccagatcattggcgaaaacgacccacagctgtcgcccacaaaactcaagcccactggcagaaaatacatcttcggctaccacccccacggcattatcggcatgggagcctttggtggaattgccaccgagggagctggatggtccaagctctttccgggcatccctgtttctcttatgactctcaccaacaacttccgagtgcctctctacagagagtacctcatgagtctgggagtcgcttctgtctccaagaagtcctgcaaggccctcctcaagcgaaaccagtctatctgcattgtcgttggtggagcacaggaaagtcttctggccagacccggtgtcatggacctggtgctactcaagcgaaagggttttgttcgacttggtatggaggtcggaaatgtcgcccttgttcccatcatggcctttggtgagaacgacctctatgaccaggttagcaacgacaagtcgtccaagctgtaccgattccagcagtttgtcaagaacttccttggattcacccttcctttgatgcatgcccgaggcgtcttcaactacgatgtcggtcttgtcccctacaggcgacccgtcaacattgtggttggttcccccattgacttgccttatctcccacaccccaccgacgaagaagtgtccgaataccacgaccgatacatcgccgagctgcagcgaatctacaacgagcacaaggatgaatatttcatcgattggaccgaggagggcaaaggagccccagagttccgaatgattgagtaagc

SEQ ID NO: 53 - DNA, 1422 bp, Glycine max
ggatccaactaaaaaaagctctcaaattacattttgagttgtttcaggttccattgccttattgctaaaactccaactaaaataacaaatagcacatgcaggtgcaaacaacacgttactctgatgaaggtgatgtgcctctagcagtctagcttatgaggctcgctgcttatcaacgattcatcattccccaagacgtgtacgcagattaaacaatggacaaaacttcaatcgattatagaataataattttaacagtgccgacttttttctgtaaacaaaaggccagaatcatatcgcacatcatcttgaatgcagtgtcgagtttggaccatttgagtacaaagccaatattgaatgatttttcgattttacatgtgtgaatcagacaaaagtgcatgcaatcacttgcaagtaaattaaggatactaatctattcctttcattttatatgctccacttttatataaaaaaatatacattattatatatgcattattaattattgcagtattatgctattggttttatggccctgctaaataacctaaatgagtctaactattgcatatgaatcaaatgaaggaagaatcatgatctaaacctgagtacccaatgcaataaaatgcgtcctattacctaaacttcaaacacacattgccatcggacgtataaattaatgcatatagattattttgagaaaagaaaacatcaaaagctctaaaacttcttttaactttgaaataagctgataaaaatacgctttaaatcaactgtgtgctgtatataagctgcaatttcacattttaccaaaccgaaacaagaatggtaacagtgaggcaaaaatttgaaaaatgtcctacttcacattcacatcaaattaattacaactaaataaataaacatcgtgattcaagcagtaatgaaagtcgaaatcagatagaatatacacgtttaacatcaattgaatttttttttaaatggatatatacaagtttactattttatatataatgaaaattcattttgtgttagcacaaaacttacagaaagagataaattttaaataaagagaattatatccaattttataatccaaaataatcaaattaaagaatattggctagatagaccggctttttcactgcccctgctggataatgaaaattcatatcaaaacaatacagaagttctagtttaataataaaaaagttggcaaactgtcattccctgttggtttttaagccaaatcacaattcaattacgtatcagaaattaatttaaaccaaatatatagctacgagggaacttcttcagtcattactagctagctcactaatcactatatatacgacatgctacaagtgaagtgaccatatcttaatttcaaatcataaaattcttccaccaagttgcggccgc

SEQ ID NO: 54 - DNA, 41 bp, Artificial Sequence
  Primer oP34-1
cgcggatccaactaaaaaaagctctcaaattacattttgag

SEQ ID NO: 55 - DNA, 44 bp, Artificial Sequence
  Primer oP34-2
gaattcgcggccgcaacttggtggaagaattttatgatttgaaa

SEQ ID NO: 56 - DNA, 7466 bp, Artificial Sequence
  Plasmid pZBL115
gatccgtcgacggcgcgcccgatcatccggatatagttcctcctttcagcaaaaaacccctcaagacccgtttagaggccccaaggggttatgctagttattgctcagcggtggcagcagccaactcagcttcctttcgggctttgttagcagccggatcgatccaagctgtacctcactattcctttgccctcggacgagtgctggggcgtcggtttccactatcggcgagtacttctacacagccatcggtccagacggccgcgcttctgcgggcgatttgtgtacgcccgacagtcccggctccggatcggacgattgcgtcgcatcgaccctgcgcccaagctgcatcatcgaaattgccgtcaaccaagctctgatagagttggtcaagaccaatgcggagcatatacgcccggagccgcggcgatcctgcaagctccggatgcctccgctcgaagtagcgcgtctgctgctccatacaagccaaccacggcctccagaagaagatgttggcgacctcgtattgggaatccccgaacatcgcctcgctccagtcaatgaccgctgttatgcggccattgtccgtcaggacattgttggagccgaaatccgcgtgcacgaggtgccggacttcggggcagtcctcggcccaaagcatcagctcatcgagagcctgcgcgacggacgcactgacggtgtcgtccatcacagtttgccagtgatacacatggggatcagcaatcgcgcatatgaaatcacgccatgtagtgtattgaccgattccttgcggtccgaatgggccgaacccgctcgtctggctaagatcggccgcagcgatcgcatccatagcctccgcgaccggctgcagaacagcgggcagttcggtttcaggcaggtcttgcaacgtgacaccctgtgcacggcgggagatgcaataggtcaggctctcgctgaattccccaatgtcaagcacttccggaatcgggagcgcggccgatgcaaagtgccgataaacataacgatctttgtagaaaccatcggcgcagctatttacccgcaggacatatccacgccctcctacatcgaagctgaaagcacgagattcttcgccctccgagagctgcatcaggtcggagacgctgtcgaacttttcgatcagaaacttctcgacagacgtcgcggtgagttcaggcttttccatgggtatatctccttcttaaagttaaacaaaattatttctagagggaaaccgttgtggtctccctatagtgagtcgtattaatttcgcgggatcgagatcgatccaattccaatcccacaaaaatctgagcttaacagcacagttgctcctctcagagcagaatcgggtattcaacaccctcatatcaactactacgttgtgtataacggtccacatgccggtatatacgatgactggggttgtacaaaggcggcaacaaacggcgttcccggagttgcacacaagaaatttgccactattacagaggcaagagcagcagctgacgcgtacacaacaagtcagcaaacagacaggttgaacttcatccccaaaggagaagctcaactcaagcccaagagctttgctaaggccctaacaagcccaccaaagcaaaaagcccactggctcacgctaggaaccaaaaggcccagcagtgatccagccccaaaagagatctcctttgccccggagattacaatggacgatttcctctatctttacgatctaggaaggaagttcgaaggtgaaggtgacgacactatgttcaccactgataatgagaaggttagcctcttcaatttcagaaagaatgctgacccacagatggttagagaggcctacgcagcaggtctcatcaagacgatctacccgagtaacaatctccaggagatcaaataccttcccaagaaggttaaagatgcagtcaaaagattcaggactaattgcatcaagaacacagagaaagacatatttctcaagatcagaagtactattccagtatggacgattcaaggcttgcttcataaaccaaggcaagtaatagagattggagtctctaaaaaggtagttcctactgaatctaaggccatgcatggagtctaagattcaaatcgaggatctaacagaactcgccgtgaagactggcgaacagttcatacagagtcttttacgactcaatgacaagaagaaaatcttcgtcaacatggtggagcacgacactctggtctactccaaaaatgtcaaagatacagtctcagaagaccaaagggctattgagacttttcaacaaaggataatttcgggaaacctcctcggattccattgcccagctatctgtcacttcatcgaaaggacagtagaaaaggaaggtggctcctacaaatgccatcattgcgataaaggaaaggctatcattcaagatgcctctgccgacagtggtcccaaagatggacccccacccacgaggagcatcgtggaaaaagaagacgttccaaccacgtcttcaaagcaagtggattgatgtgacatctccactgacgtaagggatgacgcacaatcccactatccttcgcaagacccttcctctatataaggaagttcatttcatttggagaggacacgctcgagctcatttctctattacttcagccataacaaaagaactcttttctcttcttattaaaccatgaaaaagcctgaactcaccgcgacgtctgtcgagaagtttctgatcgaaaagttcgacagcgtctccgacctgatgcagctctcggagggcgaagaatctcgtgctttcagcttcgatgtaggagggcgtggatatgtcctgcgggtaaatagctgcgccgatggtttctacaaagatcgttatgtttatcggcactttgcatcggccgcgctcccgattccggaagtgcttgacattggggaattcagcgagagcctgacctattgcatctcccgccgtgcacagggtgtcacgttgcaagacctgcctgaaaccgaactgcccgctgttctgcagccggtcgcggaggccatggatgcgatcgctgcggccgatcttagccagacgagcgggttcggcccattcggaccgcaaggaatcggtcaatacactacatggcgtgatttcatatgcgcgattgctgatccccatgtgtatcactggcaaactgtgatggacgacaccgtcagtgcgtccgtcgcgcaggctctcgatgagctgatgctttgggccgaggactgccccgaagtccggcacctcgtgcacgcggatttcggctccaacaatgtcctgacggacaatggccgcataacagcggtcattgactggagcgaggcgatgttcggggattcccaatacgaggtcgccaacatcttcttctggaggccgtggttggcttgtatggagcagcagacgcgctacttcgagcggaggcatccggagcttgcaggatcgccgcggctccgggcgtatatgctccgcattggtcttgaccaactctatcagagcttggttgacggcaatttcgatgatgcagcttgggcgcagggtcgatgcgacgcaatcgtccgatccggagccgggactgtcgggcgtacacaaatcgcccgcagaagcgcggccgtctggaccgatggctgtgtagaagtactcgccgatagtggaaaccgacgccccagcactcgtccgagggcaaaggaatagtgaggtacctaaagaaggagtgcgtcgaagcagatcgttcaaacatttggcaataaagtttcttaagattgaatcctgttgccggtcttgcgatgattatcatataatttctgttgaattacgttaagcatgtaataattaacatgtaatgcatgacgttatttatgagatgggtttttatgattagagtcccgcaattatacatttaatacgcgatagaaaacaaaatatagcgcgcaaactaggataaattatcgcgcgcggtgtcatctatgttactagatcgatgtcgaatctgatcaacctgcattaatgaatcggccaacgcgcggggagaggcggtttgcgtattgggcgctcttccgcttcctcgctcactgactcgctgcgctcggtcgttcggctgcggcgagcggtatcagctcactcaaaggcggtaatacggttatccacagaatcaggggataacgcaggaaagaacatgtgagcaaaaggccagcaaaaggccaggaaccgtaaaaaggccgcgttgctggcgtttttccataggctccgcccccctgacgagcatcacaaaaatcgacgctcaagtcagaggtggcgaaacccgacaggactataaagataccaggcgtttccccctggaagctccctcgtgcgctctcctgttccgaccctgccgcttaccggatacctgtccgcctttctcccttcgggaagcgtggcgctttctcaatgctcacgctgtaggtatctcagttcggtgtaggtcgttcgctccaagctgggctgtgtgcacgaaccccccgttcagcccgaccgctgcgccttatccggtaactatcgtcttgagtccaacccggtaagacacgacttatcgccactggcagcagccactggtaacaggattagcagagcgaggtatgtaggcggtgctacagagttcttgaagtggtggcctaactacggctacactagaaggacagtatttggtatctgcgctctgctgaagccagttaccttcggaaaaagagttggtagctcttgatccggcaaacaaaccaccgctggtagcggtggtttttttgtttgcaagcagcagattacgcgcagaaaaaaaggatctcaagaagatcctttgatcttttctacggggtctgacgctcagtggaacgaaaactcacgttaagggattttggtcatgacattaacctataaaaataggcgtatcacgaggccctttcgtctcgcgcgtttcggtgatgacggtgaaaacctctgacacatgcagctcccggagacggtcacagcttgtctgtaagcggatgccgggagcagacaagcccgtcagggcgcgtcagcgggtgttggcgggtgtcggggctggcttaactatgcggcatcagagcagattgtactgagagtgcaccatatggacatattgtcgttagaacgcggctacaattaatacataaccttatgtatcatacacatacgatttaggtgacactatagaacggcgcgccaagcttgttgaaacatccctgaagtgtctcattttattttatttattctttgctgataaaaaaataaaataaaagaagctaagcacacggtcaaccattgctctactgctaaaagggttatgtgtagtgttttactgcataaattatgcagcaaacaagacaactcaaattaaaaaatttcctttgcttgtttttttgttgtctctgacttgactttcttgtggaagttggttgtataaggattgggacaccattgtccttcttaatttaattttattctttgctgataaaaaaaaaaatttcatatagtgttaaataataatttgttaaataaccaaaaagtcaaatatgtttactctcgtttaaataattgagattcgtccagcaaggctaaacgattgtatagatttatgacaatatttacttttttatagataaatgttatattataataaatttatatacatatattatatgttatttattattattttaaatccttcaatattttatcaaaccaactcataattttttttttatctgtaagaagcaataaaattaaatagacccactttaaggatgatccaacctttatacagagtaagagagttcaaatagtaccctttcatatacatatcaactaaaatattagaaatatcatggatcaaaccttataaagacattaaataagtggataagtataatatataaatgggtagtatataatatataaatggatacaaacttctctctttataattgttatgtctccttaacatcctaatataatacataagtgggtaatatataatatataaatggagacaaacttcttccattataattgttatgtcttcttaacacttatgtctcgttcacaatgctaaggttagaattgtttagaaagtcttatagtacacatttgtttttgtactatttgaagcattccataagccgtcacgattcagatgatttataataataagaggaaatttatcatagaacaataaggtgcatagatagagtgttaatatatcataacatcctttgtttattcatagaagaagtgagatggagctcagttattatactgttacatggtcggatacaatattccatgctctccatgagctcttacacctacatgcattttagttcatacttgcggccgctctagcccggccgcctccagctttctttcctccctgcattttcaaagatcaattatttcctttctttgtttctcacttaggttctttcttctttcaacagcacaccgcatgctaccaaataaatagatttaggtgcggcgctatcttttgcacacgtgtcagtgcagtacgcgtggcaagtttctgaggattattggactaatcgtcttacacgtaattgccgcgtgtctgtttgcaacgagcttcaacacagtgttagggacacgtggcaatcaaccactcgtgcaataggggcttacataaacggtcgattaatctaattggggatgaaattgacttctcttatcccttccaaattgtctctccgttatcccttccaaatgatgttaagatttgtattaatatttaaaatgatatcattttgaaagaataatttgaaaaaggataataaaaagttaaatcaaatgcgaaatatactaaaagttattgattaaagttattgattaaaattattgctaatcatctctcaactctcaaatgtttctctttaattctatgcaacttaagctctaattaatagcacttactagtagttagaggcagataaaaacatgaagaaaaaaaaaactttctttatcaattgatacaagaatatgatcctttatttatattaaagtggaagtgacatttagcctatcgcacgtagtgttgaaccattcctcaattgaaagagaatgtgaagggtgaattgaaaagaaaaaagagagatggaaaggaagaatttgaaatagagatagaacaacaaagtttagctctttgccttcgtacatatattttaaaaatattatttttcagtacaaaaatcgcaataatgtcacactatgatttatgtatgacattgttgtaagttggtgtggcgtaagtacttgattaaattatttatcaaatgcaatttgcaaaacaattttgaatgaatttgtttaaaaagtattgctgttaaattttttatcttagaagaattgagggatcgggcg

SEQ ID NO: 57 - DNA, 7841 bp, Artificial Sequence
  Plasmid pJS89
gatccgtcgacggcgcgcccgatcatccggatatagttcctcctttcagcaaaaaacccctcaagacccgtttagaggccccaaggggttatgctagttattgctcagcggtggcagcagccaactcagcttcctttcgggctttgttagcagccggatcgatccaagctgtacctcactattcctttgccctcggacgagtgctggggcgtcggtttccactatcggcgagtacttctacacagccatcggtccagacggccgcgcttctgcgggcgatttgtgtacgcccgacagtcccggctccggatcggacgattgcgtcgcatcgaccctgcgcccaagctgcatcatcgaaattgccgtcaaccaagctctgatagagttggtcaagaccaatgcggagcatatacgcccggagccgcggcgatcctgcaagctccggatgcctccgctcgaagtagcgcgtctgctgctccatacaagccaaccacggcctccagaagaagatgttggcgacctcgtattgggaatccccgaacatcgcctcgctccagtcaatgaccgctgttatgcggccattgtccgtcaggacattgttggagccgaaatccgcgtgcacgaggtgccggacttcggggcagtcctcggcccaaagcatcagctcatcgagagcctgcgcgacggacgcactgacggtgtcgtccatcacagtttgccagtgatacacatggggatcagcaatcgcgcatatgaaatcacgccatgtagtgtattgaccgattccttgcggtccgaatgggccgaacccgctcgtctggctaagatcggccgcagcgatcgcatccatagcctccgcgaccggctgcagaacagcgggcagttcggtttcaggcaggtcttgcaacgtgacaccctgtgcacggcgggagatgcaataggtcaggctctcgctgaattccccaatgtcaagcacttccggaatcgggagcgcggccgatgcaaagtgccgataaacataacgatctttgtagaaaccatcggcgcagctatttacccgcaggacatatccacgccctcctacatcgaagctgaaagcacgagattcttcgccctccgagagctgcatcaggtcggagacgctgtcgaacttttcgatcagaaacttctcgacagacgtcgcggtgagttcaggcttttccatgggtatatctccttcttaaagttaaacaaaattatttctagagggaaaccgttgtggtctccctatagtgagtcgtattaatttcgcgggatcgagatcgatccaattccaatcccacaaaaatctgagcttaacagcacagttgctcctctcagagcagaatcgggtattcaacaccctcatatcaactactacgttgtgtataacggtccacatgccggtatatacgatgactggggttgtacaaaggcggcaacaaacggcgttcccggagttgcacacaagaaatttgccactattacagaggcaagagcagcagctgacgcgtacacaacaagtcagcaaacagacaggttgaacttcatccccaaaggagaagctcaactcaagcccaagagctttgctaaggccctaacaagcccaccaaagcaaaaagcccactggctcacgctaggaaccaaaaggcccagcagtgatccagccccaaaagagatctcctttgccccggagattacaatggacgatttcctctatctttacgatctaggaaggaagttcgaaggtgaaggtgacgacactatgttcaccactgataatgagaaggttagcctcttcaatttcagaaagaatgctgacccacagatggttagagaggcctacgcagcaggtctcatcaagacgatctacccgagtaacaatctccaggagatcaaataccttcccaagaaggttaaagatgcagtcaaaagattcaggactaattgcatcaagaacacagagaaagacatatttctcaagatcagaagtactattccagtatggacgattcaaggcttgcttcataaaccaaggcaagtaatagagattggagtctctaaaaaggtagttcctactgaatctaaggccatgcatggagtctaagattcaaatcgaggatctaacagaactcgccgtgaagactggcgaacagttcatacagagtcttttacgactcaatgacaagaagaaaatcttcgtcaacatggtggagcacgacactctggtctactccaaaaatgtcaaagatacagtctcagaagaccaaagggctattgagacttttcaacaaaggataatttcgggaaacctcctcggattccattgcccagctatctgtcacttcatcgaaaggacagtagaaaaggaaggtggctcctacaaatgccatcattgcgataaaggaaaggctatcattcaagatgcctctgccgacagtggtcccaaagatggacccccacccacgaggagcatcgtggaaaaagaagacgttccaaccacgtcttcaaagcaagtggattgatgtgacatctccactgacgtaagggatgacgcacaatcccactatccttcgcaagacccttcctctatataaggaagttcatttcatttggagaggacacgctcgagctcatttctctattacttcagccataacaaaagaactcttttctcttcttattaaaccatgaaaaagcctgaactcaccgcgacgtctgtcgagaagtttctgatcgaaaagttcgacagcgtctccgacctgatgcagctctcggagggcgaagaatctcgtgctttcagcttcgatgtaggagggcgtggatatgtcctgcgggtaaatagctgcgccgatggtttctacaaagatcgttatgtttatcggcactttgcatcggccgcgctcccgattccggaagtgcttgacattggggaattcagcgagagcctgacctattgcatctcccgccgtgcacagggtgtcacgttgcaagacctgcctgaaaccgaactgcccgctgttctgcagccggtcgcggaggccatggatgcgatcgctgcggccgatcttagccagacgagcgggttcggcccattcggaccgcaaggaatcggtcaatacactacatggcgtgatttcatatgcgcgattgctgatccccatgtgtatcactggcaaactgtgatggacgacaccgtcagtgcgtccgtcgcgcaggctctcgatgagctgatgctttgggccgaggactgccccgaagtccggcacctcgtgcacgcggatttcggctccaacaatgtcctgacggacaatggccgcataacagcggtcattgactggagcgaggcgatgttcggggattcccaatacgaggtcgccaacatcttcttctggaggccgtggttggcttgtatggagcagcagacgcgctacttcgagcggaggcatccggagcttgcaggatcgccgcggctccgggcgtatatgctccgcattggtcttgaccaactctatcagagcttggttgacggcaatttcgatgatgcagcttgggcgcagggtcgatgcgacgcaatcgtccgatccggagccgggactgtcgggcgtacacaaatcgcccgcagaagcgcggccgtctggaccgatggctgtgtagaagtactcgccgatagtggaaaccgacgccccagcactcgtccgagggcaaaggaatagtgaggtacctaaagaaggagtgcgtcgaagcagatcgttcaaacatttggcaataaagtttcttaagattgaatcctgttgccggtcttgcgatgattatcatataatttctgttgaattacgttaagcatgtaataattaacatgtaatgcatgacgttatttatgagatgggtttttatgattagagtcccgcaattatacatttaatacgcgatagaaaacaaaatatagcgcgcaaactaggataaattatcgcgcgcggtgtcatctatgttactagatcgatgtcgaatctgatcaacctgcattaatgaatcggccaacgcgcggggagaggcggtttgcgtattgggcgctcttccgcttcctcgctcactgactcgctgcgctcggtcgttcggctgcggcgagcggtatcagctcactcaaaggcggtaatacggttatccacagaatcaggggataacgcaggaaagaacatgtgagcaaaaggccagcaaaaggccaggaaccgtaaaaaggccgcgttgctggcgtttttccataggctccgcccccctgacgagcatcacaaaaatcgacgctcaagtcagaggtggcgaaacccgacaggactataaagataccaggcgtttccccctggaagctccctcgtgcgctctcctgttccgaccctgccgcttaccggatacctgtccgcctttctcccttcgggaagcgtggcgctttctcaatgctcacgctgtaggtatctcagttcggtgtaggtcgttcgctccaagctgggctgtgtgcacgaaccccccgttcagcccgaccgctgcgccttatccggtaactatcgtcttgagtccaacccggtaagacacgacttatcgccactggcagcagccactggtaacaggattagcagagcgaggtatgtaggcggtgctacagagttcttgaagtggtggcctaactacggctacactagaaggacagtatttggtatctgcgctctgctgaagccagttaccttcggaaaaagagttggtagctcttgatccggcaaacaaaccaccgctggtagcggtggtttttttgtttgcaagcagcagattacgcgcagaaaaaaaggatctcaagaagatcctttgatcttttctacggggtctgacgctcagtggaacgaaaactcacgttaagggattttggtcatgacattaacctataaaaataggcgtatcacgaggccctttcgtctcgcgcgtttcggtgatgacggtgaaaacctctgacacatgcagctcccggagacggtcacagcttgtctgtaagcggatgccgggagcagacaagcccgtcagggcgcgtcagcgggtgttggcgggtgtcggggctggcttaactatgcggcatcagagcagattgtactgagagtgcaccatatggacatattgtcgttagaacgcggctacaattaatacataaccttatgtatcatacacatacgatttaggtgacactatagaacggcgcgccaagcttgttgaaacatccctgaagtgtctcattttattttatttattctttgctgataaaaaaataaaataaaagaagctaagcacacggtcaaccattgctctactgctaaaagggttatgtgtagtgttttactgcataaattatgcagcaaacaagacaactcaaattaaaaaatttcctttgcttgtttttttgttgtctctgacttgactttcttgtggaagttggttgtataaggattgggacaccattgtccttcttaatttaattttattctttgctgataaaaaaaaaaatttcatatagtgttaaataataatttgttaaataaccaaaaagtcaaatatgtttactctcgtttaaataattgagattcgtccagcaaggctaaacgattgtatagatttatgacaatatttacttttttatagataaatgttatattataataaatttatatacatatattatatgttatttattattattttaaatccttcaatattttatcaaaccaactcataattttttttttatctgtaagaagcaataaaattaaatagacccactttaaggatgatccaacctttatacagagtaagagagttcaaatagtaccctttcatatacatatcaactaaaatattagaaatatcatggatcaaaccttataaagacattaaataagtggataagtataatatataaatgggtagtatataatatataaatggatacaaacttctctctttataattgttatgtctccttaacatcctaatataatacataagtgggtaatatataatatataaatggagacaaacttcttccattataattgttatgtcttcttaacacttatgtctcgttcacaatgctaaggttagaattgtttagaaagtcttatagtacacatttgtttttgtactatttgaagcattccataagccgtcacgattcagatgatttataataataagaggaaatttatcatagaacaataaggtgcatagatagagtgttaatatatcataacatcctttgtttattcatagaagaagtgagatggagctcagttattatactgttacatggtcggatacaatattccatgctctccatgagctcttacacctacatgcattttagttcatacttgcggccgcaacttggtggaagaattttatgatttgaaattaagatatggtcacttcacttgtagcatgtcgtatatatagtgattagtgagctagctagtaatgactgaagaagttccctcgtagctatatatttggtttaaattaatttctgatacgtaattgaattgtgatttggcttaaaaaccaacagggaatgacagtttgccaacttttttattattaaactagaacttctgtattgttttgatatgaattttcattatccagcaggggcagtgaaaaagccggtctatctagccaatattctttaatttgattattttggattataaaattggatataattctctttatttaaaatttatctctttctgtaagttttgtgctaacacaaaatgaattttcattatatataaaatagtaaacttgtatatatccatttaaaaaaaaattcaattgatgttaaacgtgtatattctatctgatttcgactttcattactgcttgaatcacgatgtttatttatttagttgtaattaatttgatgtgaatgtgaagtaggacatttttcaaatttttgcctcactgttaccattcttgtttcggtttggtaaaatgtgaaattgcagcttatatacagcacacagttgatttaaagcgtatttttatcagcttatttcaaagttaaaagaagttttagagcttttgatgttttcttttctcaaaataatctatatgcattaatttatacgtccgatggcaatgtgtgtttgaagtttaggtaataggacgcattttattgcattgggtactcaggtttagatcatgattcttccttcatttgattcatatgcaatagttagactcatttaggttatttagcagggccataaaaccaatagcataatactgcaataattaataatgcatatataataatgtatatttttttatataaaagtggagcatataaaatgaaaggaatagattagtatccttaatttacttgcaagtgattgcatgcacttttgtctgattcacacatgtaaaatcgaaaaatcattcaatattggctttgtactcaaatggtccaaactcgacactgcattcaagatgatgtgcgatatgattctggccttttgtttacagaaaaaagtcggcactgttaaaattattattctataatcgattgaagttttgtccattgtttaatctgcgtacacgtcttggggaatgatgaatcgttgataagcagcgagcctcataagctagactgctagaggcacatcaccttcatcagagtaacgtgttgtttgcacctgcatgtgctatttgttattttagttggagttttagcaataaggcaatggaacctgaaacaactcaaaatgtaatttgagagctttttttagttg

SEQ ID NO: 58 - DNA, 1390 bp, Morteriella alpina
gcggccgcatggctgctgctcccagtgtgaggacgtttactcgggccgaggttttgaatgccgaggctctgaatgagggcaagaaggatgccgaggcacccttcttgatgatcatcgacaacaaggtgtacgatgtccgcgagttcgtccctgatcatcccggtggaagtgtgattctcacgcacgttggcaaggacggcactgacgtctttgacacttttcaccccgaggctgcttgggagactcttgccaacttttacgttggtgatattgacgagagcgaccgcgatatcaagaatgatgactttgcggccgaggtccgcaagctgcgtaccttgttccagtctcttggttactacgattcttccaaggcatactacgccttcaaggtctcgttcaacctctgcatctggggtttgtcgacggtcattgtggccaagtggggccagacctcgaccctcgccaacgtgctctcggctgcgcttttgggtctgttctggcagcagtgcggatggttggctcacgactttttgcatcaccaggtcttccaggaccgtttctggggtgatcttttcggcgccttcttgggaggtgtctgccagggcttctcgtcctcgtggtggaaggacaagcacaacactcaccacgccgcccccaacgtccacggcgaggatcccgacattgacacccaccctctgttgacctggagtgagcatgcgttggagatgttctcggatgtcccagatgaggagctgacccgcatgtggtcgcgtttcatggtcctgaaccagacctggttttacttccccattctctcgtttgcccgtctctcctggtgcctccagtccattctctttgtgctgcctaacggtcaggcccacaagccctcgggcgcgcgtgtgcccatctcgttggtcgagcagctgtcgcttgcgatgcactggacctggtacctcgccaccatgttcctgttcatcaaggatcccgtcaacatgctggtgtactttttggtgtcgcaggcggtgtgcggaaacttgttggcgatcgtgttctcgctcaaccacaacggtatgcctgtgatctcgaaggaggaggcggtcgatatggatttcttcacgaagcagatcatcacgggtcgtgatgtccacccgggtctatttgccaactggttcacgggtggattgaactatcagatcgagcaccacttgttcccttcgatgcctcgccacaacttttcaaagatccagcctgctgtcgagaccctgtgcaaaaagtacaatgtccgataccacaccaccggtatgatcgagggaactgcagaggtctttagccgtctgaacgaggtctccaaggctgcctccaagatgggtaaggcgcagtaagcggccgc

SEQ ID NO: 59 - DNA, 9223 bp, Artificial Sequence
  Plasmid pJS93
gatccgtcgacggcgcgcccgatcatccggatatagttcctcctttcagcaaaaaacccctcaagacccgtttagaggccccaaggggttatgctagttattgctcagcggtggcagcagccaactcagcttcctttcgggctttgttagcagccggatcgatccaagctgtacctcactattcctttgccctcggacgagtgctggggcgtcggtttccactatcggcgagtacttctacacagccatcggtccagacggccgcgcttctgcgggcgatttgtgtacgcccgacagtcccggctccggatcggacgattgcgtcgcatcgaccctgcgcccaagctgcatcatcgaaattgccgtcaaccaagctctgatagagttggtcaagaccaatgcggagcatatacgcccggagccgcggcgatcctgcaagctccggatgcctccgctcgaagtagcgcgtctgctgctccatacaagccaaccacggcctccagaagaagatgttggcgacctcgtattgggaatccccgaacatcgcctcgctccagtcaatgaccgctgttatgcggccattgtccgtcaggacattgttggagccgaaatccgcgtgcacgaggtgccggacttcggggcagtcctcggcccaaagcatcagctcatcgagagcctgcgcgacggacgcactgacggtgtcgtccatcacagtttgccagtgatacacatggggatcagcaatcgcgcatatgaaatcacgccatgtagtgtattgaccgattccttgcggtccgaatgggccgaacccgctcgtctggctaagatcggccgcagcgatcgcatccatagcctccgcgaccggctgcagaacagcgggcagttcggtttcaggcaggtcttgcaacgtgacaccctgtgcacggcgggagatgcaataggtcaggctctcgctgaattccccaatgtcaagcacttccggaatcgggagcgcggccgatgcaaagtgccgataaacataacgatctttgtagaaaccatcggcgcagctatttacccgcaggacatatccacgccctcctacatcgaagctgaaagcacgagattcttcgccctccgagagctgcatcaggtcggagacgctgtcgaacttttcgatcagaaacttctcgacagacgtcgcggtgagttcaggcttttccatgggtatatctccttcttaaagttaaacaaaattatttctagagggaaaccgttgtggtctccctatagtgagtcgtattaatttcgcgggatcgagatcgatccaattccaatcccacaaaaatctgagcttaacagcacagttgctcctctcagagcagaatcgggtattcaacaccctcatatcaactactacgttgtgtataacggtccacatgccggtatatacgatgactggggttgtacaaaggcggcaacaaacggcgttcccggagttgcacacaagaaatttgccactattacagaggcaagagcagcagctgacgcgtacacaacaagtcagcaaacagacaggttgaacttcatccccaaaggagaagctcaactcaagcccaagagctttgctaaggccctaacaagcccaccaaagcaaaaagcccactggctcacgctaggaaccaaaaggcccagcagtgatccagccccaaaagagatctcctttgccccggagattacaatggacgatttcctctatctttacgatctaggaaggaagttcgaaggtgaaggtgacgacactatgttcaccactgataatgagaaggttagcctcttcaatttcagaaagaatgctgacccacagatggttagagaggcctacgcagcaggtctcatcaagacgatctacccgagtaacaatctccaggagatcaaataccttcccaagaaggttaaagatgcagtcaaaagattcaggactaattgcatcaagaacacagagaaagacatatttctcaagatcagaagtactattccagtatggacgattcaaggcttgcttcataaaccaaggcaagtaatagagattggagtctctaaaaaggtagttcctactgaatctaaggccatgcatggagtctaagattcaaatcgaggatctaacagaactcgccgtgaagactggcgaacagttcatacagagtcttttacgactcaatgacaagaagaaaatcttcgtcaacatggtggagcacgacactctggtctactccaaaaatgtcaaagatacagtctcagaagaccaaagggctattgagacttttcaacaaaggataatttcgggaaacctcctcggattccattgcccagctatctgtcacttcatcgaaaggacagtagaaaaggaaggtggctcctacaaatgccatcattgcgataaaggaaaggctatcattcaagatgcctctgccgacagtggtcccaaagatggacccccacccacgaggagcatcgtggaaaaagaagacgttccaaccacgtcttcaaagcaagtggattgatgtgacatctccactgacgtaagggatgacgcacaatcccactatccttcgcaagacccttcctctatataaggaagttcatttcatttggagaggacacgctcgagctcatttctctattacttcagccataacaaaagaactcttttctcttcttattaaaccatgaaaaagcctgaactcaccgcgacgtctgtcgagaagtttctgatcgaaaagttcgacagcgtctccgacctgatgcagctctcggagggcgaagaatctcgtgctttcagcttcgatgtaggagggcgtggatatgtcctgcgggtaaatagctgcgccgatggtttctacaaagatcgttatgtttatcggcactttgcatcggccgcgctcccgattccggaagtgcttgacattggggaattcagcgagagcctgacctattgcatctcccgccgtgcacagggtgtcacgttgcaagacctgcctgaaaccgaactgcccgctgttctgcagccggtcgcggaggccatggatgcgatcgctgcggccgatcttagccagacgagcgggttcggcccattcggaccgcaaggaatcggtcaatacactacatggcgtgatttcatatgcgcgattgctgatccccatgtgtatcactggcaaactgtgatggacgacaccgtcagtgcgtccgtcgcgcaggctctcgatgagctgatgctttgggccgaggactgccccgaagtccggcacctcgtgcacgcggatttcggctccaacaatgtcctgacggacaatggccgcataacagcggtcattgactggagcgaggcgatgttcggggattcccaatacgaggtcgccaacatcttcttctggaggccgtggttggcttgtatggagcagcagacgcgctacttcgagcggaggcatccggagcttgcaggatcgccgcggctccgggcgtatatgctccgcattggtcttgaccaactctatcagagcttggttgacggcaatttcgatgatgcagcttgggcgcagggtcgatgcgacgcaatcgtccgatccggagccgggactgtcgggcgtacacaaatcgcccgcagaagcgcggccgtctggaccgatggctgtgtagaagtactcgccgatagtggaaaccgacgccccagcactcgtccgagggcaaaggaatagtgaggtacctaaagaaggagtgcgtcgaagcagatcgttcaaacatttggcaataaagtttcttaagattgaatcctgttgccggtcttgcgatgattatcatataatttctgttgaattacgttaagcatgtaataattaacatgtaatgcatgacgttatttatgagatgggtttttatgattagagtcccgcaattatacatttaatacgcgatagaaaacaaaatatagcgcgcaaactaggataaattatcgcgcgcggtgtcatctatgttactagatcgatgtcgaatctgatcaacctgcattaatgaatcggccaacgcgcggggagaggcggtttgcgtattgggcgctcttccgcttcctcgctcactgactcgctgcgctcggtcgttcggctgcggcgagcggtatcagctcactcaaaggcggtaatacggttatccacagaatcaggggataacgcaggaaagaacatgtgagcaaaaggccagcaaaaggccaggaaccgtaaaaaggccgcgttgctggcgtttttccataggctccgcccccctgacgagcatcacaaaaatcgacgctcaagtcagaggtggcgaaacccgacaggactataaagataccaggcgtttccccctggaagctccctcgtgcgctctcctgttccgaccctgccgcttaccggatacctgtccgcctttctcccttcgggaagcgtggcgctttctcaatgctcacgctgtaggtatctcagttcggtgtaggtcgttcgctccaagctgggctgtgtgcacgaaccccccgttcagcccgaccgctgcgccttatccggtaactatcgtcttgagtccaacccggtaagacacgacttatcgccactggcagcagccactggtaacaggattagcagagcgaggtatgtaggcggtgctacagagttcttgaagtggtggcctaactacggctacactagaaggacagtatttggtatctgcgctctgctgaagccagttaccttcggaaaaagagttggtagctcttgatccggcaaacaaaccaccgctggtagcggtggtttttttgtttgcaagcagcagattacgcgcagaaaaaaaggatctcaagaagatcctttgatcttttctacggggtctgacgctcagtggaacgaaaactcacgttaagggattttggtcatgacattaacctataaaaataggcgtatcacgaggccctttcgtctcgcgcgtttcggtgatgacggtgaaaacctctgacacatgcagctcccggagacggtcacagcttgtctgtaagcggatgccgggagcagacaagcccgtcagggcgcgtcagcgggtgttggcgggtgtcggggctggcttaactatgcggcatcagagcagattgtactgagagtgcaccatatggacatattgtcgttagaacgcggctacaattaatacataaccttatgtatcatacacatacgatttaggtgacactatagaacggcgcgccaagcttgttgaaacatccctgaagtgtctcattttattttatttattctttgctgataaaaaaataaaataaaagaagctaagcacacggtcaaccattgctctactgctaaaagggttatgtgtagtgttttactgcataaattatgcagcaaacaagacaactcaaattaaaaaatttcctttgcttgtttttttgttgtctctgacttgactttcttgtggaagttggttgtataaggattgggacaccattgtccttcttaatttaattttattctttgctgataaaaaaaaaaatttcatatagtgttaaataataatttgttaaataaccaaaaagtcaaatatgtttactctcgtttaaataattgagattcgtccagcaaggctaaacgattgtatagatttatgacaatatttacttttttatagataaatgttatattataataaatttatatacatatattatatgttatttattattattttaaatccttcaatattttatcaaaccaactcataattttttttttatctgtaagaagcaataaaattaaatagacccactttaaggatgatccaacctttatacagagtaagagagttcaaatagtaccctttcatatacatatcaactaaaatattagaaatatcatggatcaaaccttataaagacattaaataagtggataagtataatatataaatgggtagtatataatatataaatggatacaaacttctctctttataattgttatgtctccttaacatcctaatataatacataagtgggtaatatataatatataaatggagacaaacttcttccattataattgttatgtcttcttaacacttatgtctcgttcacaatgctaaggttagaattgtttagaaagtcttatagtacacatttgtttttgtactatttgaagcattccataagccgtcacgattcagatgatttataataataagaggaaatttatcatagaacaataaggtgcatagatagagtgttaatatatcataacatcctttgtttattcatagaagaagtgagatggagctcagttattatactgttacatggtcggatacaatattccatgctctccatgagctcttacacctacatgcattttagttcatacttgcggccgcttactgcgccttacccatcttggaggcagccttggagacctcgttcagacggctaaagacctctgcagttccctcgatcataccggtggtgtggtatcggacattgtactttttgcacagggtctcgacagcaggctggatctttgaaaagttgtggcgaggcatcgaagggaacaagtggtgctcgatctgatagttcaatccacccgtgaaccagttggcaaatagacccgggtggacatcacgacccgtgatgatctgcttcgtgaagaaatccatatcgaccgcctcctccttcgagatcacaggcataccgttgtggttgagcgagaacacgatcgccaacaagtttccgcacaccgcctgcgacaccaaaaagtacaccagcatgttgacgggatccttgatgaacaggaacatggtggcgaggtaccaggtccagtgcatcgcaagcgacagctgctcgaccaacgagatgggcacacgcgcgcccgagggcttgtgggcctgaccgttaggcagcacaaagagaatggactggaggcaccaggagagacgggcaaacgagagaatggggaagtaaaaccaggtctggttcaggaccatgaaacgcgaccacatgcgggtcagctcctcatctgggacatccgagaacatctccaacgcatgctcactccaggtcaacagagggtgggtgtcaatgtcgggatcctcgccgtggacgttgggggcggcgtggtgagtgttgtgcttgtccttccaccacgaggacgagaagccctggcagacacctcccaagaaggcgccgaaaagatcaccccagaaacggtcctggaagacctggtgatgcaaaaagtcgtgagccaaccatccgcactgctgccagaacagacccaaaagcgcagccgagagcacgttggcgagggtcgaggtctggccccacttggccacaatgaccgtcgacaaaccccagatgcagaggttgaacgagaccttgaaggcgtagtatgccttggaagaatcgtagtaaccaagagactggaacaaggtacgcagcttgcggacctcggccgcaaagtcatcattcttgatatcgcggtcgctctcgtcaatatcaccaacgtaaaagttggcaagagtctcccaagcagcctcggggtgaaaagtgtcaaagacgtcagtgccgtccttgccaacgtgcgtgagaatcacacttccaccgggatgatcagggacgaactcgcggacatcgtacaccttgttgtcgatgatcatcaagaagggtgcctcggcatccttcttgccctcattcagagcctcggcattcaaaacctcggcccgagtaaacgtcctcacactgggagcagcagccatgcggccgcaacttggtggaagaattttatgatttgaaattaagatatggtcacttcacttgtagcatgtcgtatatatagtgattagtgagctagctagtaatgactgaagaagttccctcgtagctatatatttggtttaaattaatttctgatacgtaattgaattgtgatttggcttaaaaaccaacagggaatgacagtttgccaacttttttattattaaactagaacttctgtattgttttgatatgaattttcattatccagcaggggcagtgaaaaagccggtctatctagccaatattctttaatttgattattttggattataaaattggatataattctctttatttaaaatttatctctttctgtaagttttgtgctaacacaaaatgaattttcattatatataaaatagtaaacttgtatatatccatttaaaaaaaaattcaattgatgttaaacgtgtatattctatctgatttcgactttcattactgcttgaatcacgatgtttatttatttagttgtaattaatttgatgtgaatgtgaagtaggacatttttcaaatttttgcctcactgttaccattcttgtttcggtttggtaaaatgtgaaattgcagcttatatacagcacacagttgatttaaagcgtatttttatcagcttatttcaaagttaaaagaagttttagagcttttgatgttttcttttctcaaaataatctatatgcattaatttatacgtccgatggcaatgtgtgtttgaagtttaggtaataggacgcattttattgcattgggtactcaggtttagatcatgattcttccttcatttgattcatatgcaatagttagactcatttaggttatttagcagggccataaaaccaatagcataatactgcaataattaataatgcatatataataatgtatatttttttatataaaagtggagcatataaaatgaaaggaatagattagtatccttaatttacttgcaagtgattgcatgcacttttgtctgattcacacatgtaaaatcgaaaaatcattcaatattggctttgtactcaaatggtccaaactcgacactgcattcaagatgatgtgcgatatgattctggccttttgtttacagaaaaaagtcggcactgttaaaattattattctataatcgattgaagttttgtccattgtttaatctgcgtacacgtcttggggaatgatgaatcgttgataagcagcgagcctcataagctagactgctagaggcacatcaccttcatcagagtaacgtgttgtttgcacctgcatgtgctatttgttattttagttggagttttagcaataaggcaatggaacctgaaacaactcaaaatgtaatttgagagctttttttagttg

SEQ ID NO: 60 - DNA, 7472 bp, Artificial Sequence
  Plasmid pKS127
gatccgtcgacggcgcgcccgatcatccggatatagttcctcctttcagcaaaaaacccctcaagacccgtttagaggccccaaggggttatgctagttattgctcagcggtggcagcagccaactcagcttcctttcgggctttgttagcagccggatcgatccaagctgtacctcactattcctttgccctcggacgagtgctggggcgtcggtttccactatcggcgagtacttctacacagccatcggtccagacggccgcgcttctgcgggcgatttgtgtacgcccgacagtcccggctccggatcggacgattgcgtcgcatcgaccctgcgcccaagctgcatcatcgaaattgccgtcaaccaagctctgatagagttggtcaagaccaatgcggagcatatacgcccggagccgcggcgatcctgcaagctccggatgcctccgctcgaagtagcgcgtctgctgctccatacaagccaaccacggcctccagaagaagatgttggcgacctcgtattgggaatccccgaacatcgcctcgctccagtcaatgaccgctgttatgcggccattgtccgtcaggacattgttggagccgaaatccgcgtgcacgaggtgccggacttcggggcagtcctcggcccaaagcatcagctcatcgagagcctgcgcgacggacgcactgacggtgtcgtccatcacagtttgccagtgatacacatggggatcagcaatcgcgcatatgaaatcacgccatgtagtgtattgaccgattccttgcggtccgaatgggccgaacccgctcgtctggctaagatcggccgcagcgatcgcatccatagcctccgcgaccggctgcagaacagcgggcagttcggtttcaggcaggtcttgcaacgtgacaccctgtgcacggcgggagatgcaataggtcaggctctcgctgaattccccaatgtcaagcacttccggaatcgggagcgcggccgatgcaaagtgccgataaacataacgatctttgtagaaaccatcggcgcagctatttacccgcaggacatatccacgccctcctacatcgaagctgaaagcacgagattcttcgccctccgagagctgcatcaggtcggagacgctgtcgaacttttcgatcagaaacttctcgacagacgtcgcggtgagttcaggcttttccatgggtatatctccttcttaaagttaaacaaaattatttctagagggaaaccgttgtggtctccctatagtgagtcgtattaatttcgcgggatcgagatcgatccaattccaatcccacaaaaatctgagcttaacagcacagttgctcctctcagagcagaatcgggtattcaacaccctcatatcaactactacgttgtgtataacggtccacatgccggtatatacgatgactggggttgtacaaaggcggcaacaaacggcgttcccggagttgcacacaagaaatttgccactattacagaggcaagagcagcagctgacgcgtacacaacaagtcagcaaacagacaggttgaacttcatccccaaaggagaagctcaactcaagcccaagagctttgctaaggccctaacaagcccaccaaagcaaaaagcccactggctcacgctaggaaccaaaaggcccagcagtgatccagccccaaaagagatctcctttgccccggagattacaatggacgatttcctctatctttacgatctaggaaggaagttcgaaggtgaaggtgacgacactatgttcaccactgataatgagaaggttagcctcttcaatttcagaaagaatgctgacccacagatggttagagaggcctacgcagcaggtctcatcaagacgatctacccgagtaacaatctccaggagatcaaataccttcccaagaaggttaaagatgcagtcaaaagattcaggactaattgcatcaagaacacagagaaagacatatttctcaagatcagaagtactattccagtatggacgattcaaggcttgcttcataaaccaaggcaagtaatagagattggagtctctaaaaaggtagttcctactgaatctaaggccatgcatggagtctaagattcaaatcgaggatctaacagaactcgccgtgaagactggcgaacagttcatacagagtcttttacgactcaatgacaagaagaaaatcttcgtcaacatggtggagcacgacactctggtctactccaaaaatgtcaaagatacagtctcagaagaccaaagggctattgagacttttcaacaaaggataatttcgggaaacctcctcggattccattgcccagctatctgtcacttcatcgaaaggacagtagaaaaggaaggtggctcctacaaatgccatcattgcgataaaggaaaggctatcattcaagatgcctctgccgacagtggtcccaaagatggacccccacccacgaggagcatcgtggaaaaagaagacgttccaaccacgtcttcaaagcaagtggattgatgtgacatctccactgacgtaagggatgacgcacaatcccactatccttcgcaagacccttcctctatataaggaagttcatttcatttggagaggacacgctcgagctcatttctctattacttcagccataacaaaagaactcttttctcttcttattaaaccatgaaaaagcctgaactcaccgcgacgtctgtcgagaagtttctgatcgaaaagttcgacagcgtctccgacctgatgcagctctcggagggcgaagaatctcgtgctttcagcttcgatgtaggagggcgtggatatgtcctgcgggtaaatagctgcgccgatggtttctacaaagatcgttatgtttatcggcactttgcatcggccgcgctcccgattccggaagtgcttgacattggggaattcagcgagagcctgacctattgcatctcccgccgtgcacagggtgtcacgttgcaagacctgcctgaaaccgaactgcccgctgttctgcagccggtcgcggaggccatggatgcgatcgctgcggccgatcttagccagacgagcgggttcggcccattcggaccgcaaggaatcggtcaatacactacatggcgtgatttcatatgcgcgattgctgatccccatgtgtatcactggcaaactgtgatggacgacaccgtcagtgcgtccgtcgcgcaggctctcgatgagctgatgctttgggccgaggactgccccgaagtccggcacctcgtgcacgcggatttcggctccaacaatgtcctgacggacaatggccgcataacagcggtcattgactggagcgaggcgatgttcggggattcccaatacgaggtcgccaacatcttcttctggaggccgtggttggcttgtatggagcagcagacgcgctacttcgagcggaggcatccggagcttgcaggatcgccgcggctccgggcgtatatgctccgcattggtcttgaccaactctatcagagcttggttgacggcaatttcgatgatgcagcttgggcgcagggtcgatgcgacgcaatcgtccgatccggagccgggactgtcgggcgtacacaaatcgcccgcagaagcgcggccgtctggaccgatggctgtgtagaagtactcgccgatagtggaaaccgacgccccagcactcgtccgagggcaaaggaatagtgaggtacctaaagaaggagtgcgtcgaagcagatcgttcaaacatttggcaataaagtttcttaagattgaatcctgttgccggtcttgcgatgattatcatataatttctgttgaattacgttaagcatgtaataattaacatgtaatgcatgacgttatttatgagatgggtttttatgattagagtcccgcaattatacatttaatacgcgatagaaaacaaaatatagcgcgcaaactaggataaattatcgcgcgcggtgtcatctatgttactagatcgatgtcgaatctgatcaacctgcattaatgaatcggccaacgcgcggggagaggcggtttgcgtattgggcgctcttccgcttcctcgctcactgactcgctgcgctcggtcgttcggctgcggcgagcggtatcagctcactcaaaggcggtaatacggttatccacagaatcaggggataacgcaggaaagaacatgtgagcaaaaggccagcaaaaggccaggaaccgtaaaaaggccgcgttgctggcgtttttccataggctccgcccccctgacgagcatcacaaaaatcgacgctcaagtcagaggtggcgaaacccgacaggactataaagataccaggcgtttccccctggaagctccctcgtgcgctctcctgttccgaccctgccgcttaccggatacctgtccgcctttctcccttcgggaagcgtggcgctttctcaatgctcacgctgtaggtatctcagttcggtgtaggtcgttcgctccaagctgggctgtgtgcacgaaccccccgttcagcccgaccgctgcgccttatccggtaactatcgtcttgagtccaacccggtaagacacgacttatcgccactggcagcagccactggtaacaggattagcagagcgaggtatgtaggcggtgctacagagttcttgaagtggtggcctaactacggctacactagaaggacagtatttggtatctgcgctctgctgaagccagttaccttcggaaaaagagttggtagctcttgatccggcaaacaaaccaccgctggtagcggtggtttttttgtttgcaagcagcagattacgcgcagaaaaaaaggatctcaagaagatcctttgatcttttctacggggtctgacgctcagtggaacgaaaactcacgttaagggattttggtcatgacattaacctataaaaataggcgtatcacgaggccctttcgtctcgcgcgtttcggtgatgacggtgaaaacctctgacacatgcagctcccggagacggtcacagcttgtctgtaagcggatgccgggagcagacaagcccgtcagggcgcgtcagcgggtgttggcgggtgtcggggctggcttaactatgcggcatcagagcagattgtactgagagtgcaccatatggacatattgtcgttagaacgcggctacaattaatacataaccttatgtatcatacacatacgatttaggtgacactatagaacggcgcgccaagcttggatccgttgaaacatccctgaagtgtctcattttattttatttattctttgctgataaaaaaataaaataaaagaagctaagcacacggtcaaccattgctttactgctaaaagggttatgtgtagtgttttactgcataaattatgcagcaaacaagacaactcaaattaaaaaatttcctttgcttgtttttttgttgtctctgacttgactttcttgtggaagttggttgtataaggattgggacaccattgtcctccttaatttaattttattctttgctgataaaaaaaaaaatttcatatagtgttaaataataatttgttaaataaccaaaaagtcaaatatgtttactctcgtttaaataattgagattcgtccagcaaggctaaacgattgtatagatttatgacaatatttacttttttatagataaatgttatattataataaatttatatacatatattatatgttatttattattattttaaatccttcaatattttatcaaaccaactcataattttttttttatctgtaagaagcaataaaattaaatagacccactttaaggatgatccaacctttatacagagtaagagagttcaaatagtaccctttcatatacatatcaactaaaatattagaaatatcatggatcaaaccttataaagacattaaataagtggataagtataatatataaatgggtagtatataatatataaatggatacaaacttctctctttataattgttatgtctccttaacatcctaatataatacataagtgggtaatatataatatataaatggagacaaacttcttccattataattgttatgtcttcttaacacttatgtctcgttcacaatgctaaagttagaattgtttagaaagtcttatagtacacatttgtttttgtactatttgaagcattccataagccgtcacgattcagatgatttataataataagaggaaatttatcatagaacaataaggtgcatagatagagtgttaatatatcataacatcctttgtttattcatagaagaagtgagatggagctcagttattatactgttacatggtcggatacaatattccatgctctccatgagctcttacacctacgtgcattttagttcatacttgcggccgctctagcccggccgcctccagctttctttcctccctgcattttcaaagatcaattatttcctttctttgtttctcacttaggttctttcttctttcaacagcacaccgcatgctaccaaataaatagatttaggtgcggcgctatcttttgcacacgtgtcagtgcagtacgcgtggcaagtttctgaggattattggactaatcgtcttacacgtaattgccgcgtgtctgtttgcaacgagcttcaacacagtgttagggacacgtggcaatcaaccactcgtgcaataggggcttacataaacggtcgattaatctaattggggatgaaattgacttctcttatcccttccaaattgtctctccgttatcccttccaaatgatgttaagatttgtattaatatttaaaatgatatcattttgaaagaataatttgaaaaaggataataaaaagttaaatcaaatgcgaaatatactaaaagttattgattaaagttattgattaaaattattgctaatcatctctcaactctcaaatgtttctctttaattctatgcaacttaagctctaattaatagcacttactagtagttagaggcagataaaaacatgaagaaaaaaaaaactttctttatcaattgatacaagaatatgatcctttatttatattaaagtggaagtgacatttagcctatcgcacgtagtgttgaaccattcctcaattgaaagagaatgtgaagggtgaattgaaaagaaaaaagagagatggaaaggaagaatttgaaatagagatagaacaacaaagtttagctctttgccttcgtacatatattttaaaaatattatttttcagtacaaaaatcgcaataatgtcacactatgatttatgtatgacattgttgtaagttggtgtggcgtaagtacttgattaaattatttatcaaatgcaatttgcaaaacaattttgaatgaatttgtttaaaaagtattgctgttaaattttttatcttagaagaattgagggatcgggcg

SEQ ID NO: 61 - DNA, 7847 bp, Artificial Sequence
  Plasmid pKS343
ggccgcaagtatgaactaaaatgcacgtaggtgtaagagctcatggagagcatggaatattgtatccgaccatgtaacagtataataactgagctccatctcacttcttctatgaataaacaaaggatgttatgatatattaacactctatctatgcaccttattgttctatgataaatttcctcttattattataaatcatctgaatcgtgacggcttatggaatgcttcaaatagtacaaaaacaaatgtgtactataagactttctaaacaattctaactttagcattgtgaacgagacataagtgttaagaagacataacaattataatggaagaagtttgtctccatttatatattatatattacccacttatgtattatattaggatgttaaggagacataacaattataaagagagaagtttgtatccatttatatattatatactacccatttatatattatacttatccacttatttaatgtctttataaggtttgatccatgatatttctaatattttagttgatatgtatatgaaagggtactatttgaactctcttactctgtataaaggttggatcatccttaaagtgggtctatttaattttattgcttcttacagataaaaaaaaaattatgagttggtttgataaaatattgaaggatttaaaataataataaataacatataatatatgtatataaatttattataatataacatttatctataaaaaagtaaatattgtcataaatctatacaatcgtttagccttgctggacgaatctcaattatttaaacgagagtaaacatatttgactttttggttatttaacaaattattatttaacactatatgaaatttttttttttatcagcaaagaataaaattaaattaaggaggacaatggtgtcccaatccttatacaaccaacttccacaagaaagtcaagtcagagacaacaaaaaaacaagcaaaggaaattttttaatttgagttgtcttgtttgctgcataatttatgcagtaaaacactacacataacccttttagcagtaaagcaatggttgaccgtgtgcttagcttcttttattttatttttttatcagcaaagaataaataaaataaaatgagacacttcagggatgtttcaacggatccaagcttggcgcgccgttctatagtgtcacctaaatcgtatgtgtatgatacataaggttatgtattaattgtagccgcgttctaacgacaatatgtccatatggtgcactctcagtacaatctgctctgatgccgcatagttaagccagccccgacacccgccaacacccgctgacgcgccctgacgggcttgtctgctcccggcatccgcttacagacaagctgtgaccgtctccgggagctgcatgtgtcagaggttttcaccgtcatcaccgaaacgcgcgagacgaaagggcctcgtgatacgcctatttttataggttaatgtcatgaccaaaatcccttaacgtgagttttcgttccactgagcgtcagaccccgtagaaaagatcaaaggatcttcttgagatcctttttttctgcgcgtaatctgctgcttgcaaacaaaaaaaccaccgctaccagcggtggtttgtttgccggatcaagagctaccaactctttttccgaaggtaactggcttcagcagagcgcagataccaaatactgtccttctagtgtagccgtagttaggccaccacttcaagaactctgtagcaccgcctacatacctcgctctgctaatcctgttaccagtggctgctgccagtggcgataagtcgtgtcttaccgggttggactcaagacgatagttaccggataaggcgcagcggtcgggctgaacggggggttcgtgcacacagcccagcttggagcgaacgacctacaccgaactgagatacctacagcgtgagcattgagaaagcgccacgcttcccgaagggagaaaggcggacaggtatccggtaagcggcagggtcggaacaggagagcgcacgagggagcttccagggggaaacgcctggtatctttatagtcctgtcgggtttcgccacctctgacttgagcgtcgatttttgtgatgctcgtcaggggggcggagcctatggaaaaacgccagcaacgcggcctttttacggttcctggccttttgctggccttttgctcacatgttctttcctgcgttatcccctgattctgtggataaccgtattaccgcctttgagtgagctgataccgctcgccgcagccgaacgaccgagcgcagcgagtcagtgagcgaggaagcggaagagcgcccaatacgcaaaccgcctctccccgcgcgttggccgattcattaatgcaggttgatcagattcgacatcgatctagtaacatagatgacaccgcgcgcgataatttatcctagtttgcgcgctatattttgttttctatcgcgtattaaatgtataattgcgggactctaatcataaaaacccatctcataaataacgtcatgcattacatgttaattattacatgcttaacgtaattcaacagaaattatatgataatcatcgcaagaccggcaacaggattcaatcttaagaaactttattgccaaatgtttgaacgatctgcttcgacgcactccttctttaggtacctcactattcctttgccctcggacgagtgctggggcgtcggtttccactatcggcgagtacttctacacagccatcggtccagacggccgcgcttctgcgggcgatttgtgtacgcccgacagtcccggctccggatcggacgattgcgtcgcatcgaccctgcgcccaagctgcatcatcgaaattgccgtcaaccaagctctgatagagttggtcaagaccaatgcggagcatatacgcccggagccgcggcgatcctgcaagctccggatgcctccgctcgaagtagcgcgtctgctgctccatacaagccaaccacggcctccagaagaagatgttggcgacctcgtattgggaatccccgaacatcgcctcgctccagtcaatgaccgctgttatgcggccattgtccgtcaggacattgttggagccgaaatccgcgtgcacgaggtgccggacttcggggcagtcctcggcccaaagcatcagctcatcgagagcctgcgcgacggacgcactgacggtgtcgtccatcacagtttgccagtgatacacatggggatcagcaatcgcgcatatgaaatcacgccatgtagtgtattgaccgattccttgcggtccgaatgggccgaacccgctcgtctggctaagatcggccgcagcgatcgcatccatggcctccgcgaccggctgcagaacagcgggcagttcggtttcaggcaggtcttgcaacgtgacaccctgtgcacggcgggagatgcaataggtcaggctctcgctgaattccccaatgtcaagcacttccggaatcgggagcgcggccgatgcaaagtgccgataaacataacgatctttgtagaaaccatcggcgcagctatttacccgcaggacatatccacgccctcctacatcgaagctgaaagcacgagattcttcgccctccgagagctgcatcaggtcggagacgctgtcgaacttttcgatcagaaacttctcgacagacgtcgcggtgagttcaggctttttcatggtttaataagaagagaaaagagttcttttgttatggctgaagtaatagagaaatgagctcgagcgtgtcctctccaaatgaaatgaacttccttatatagaggaagggtcttgcgaaggatagtgggattgtgcgtcatcccttacgtcagtggagatgtcacatcaatccacttgctttgaagacgtggttggaacgtcttctttttccacgatgctcctcgtgggtgggggtccatctttgggaccactgtcggcagaggcatcttgaatgatagcctttcctttatcgcaatgatggcatttgtaggagccaccttccttttctactgtcctttcgatgaagtgacagatagctgggcaatggaatccgaggaggtttcccgaaattatcctttgttgaaaagtctcaatagccctttggtcttctgagactgtatctttgacatttttggagtagaccagagtgtcgtgctccaccatgttgacgaagattttcttcttgtcattgagtcgtaaaagactctgtatgaactgttcgccagtcttcacggcgagttctgttagatcctcgatttgaatcttagactccatgcatggccttagattcagtaggaactacctttttagagactccaatctctattacttgccttggtttatgaagcaagccttgaatcgtccatactggaatagtacttctgatcttgagaaatatgtctttctctgtgttcttgatgcaattagtcctgaatcttttgactgcatctttaaccttcttgggaaggtatttgatctcctggagattgttactcgggtagatcgtcttgatgagacctgctgcgtaggcctctctaaccatctgtgggtcagcattctttctgaaattgaagaggctaaccttctcattatcagtggtgaacatagtgtcgtcaccttcaccttcgaacttccttcctagatcgtaaagatagaggaaatcgtccattgtaatctccggggcaaaggagatctcttttggggctggatcactgctgggccttttggttcctagcgtgagccagtgggctttttgctttggtgggcttgttagggccttagcaaagctcttgggcttgagttgagcttctcctttggggatgaagttcaacctgtctgtttgctgacttgttgtgtacgcgtcagctgctgctcttgcctctgtaatagtggcaaatttcttgtgtgcaactccgggaacgccgtttgttgccgcctttgtacaaccccagtcatcgtatataccggcatgtggaccgttatacacaacgtagtagttgatatgagggtgttgaatacccgattctgctctgagaggagcaactgtgctgttaagctcagatttttgtgggattggaattggatcgatctcgatcccgcgaaattaatacgactcactatagggagaccacaacggtttccctctagaaataattttgtttaactttaagaaggagatatacccatggaaaagcctgaactcaccgcgacgtctgtcgagaagtttctgatcgaaaagttcgacagcgtctccgacctgatgcagctctcggagggcgaagaatctcgtgctttcagcttcgatgtaggagggcgtggatatgtcctgcgggtaaatagctgcgccgatggtttctacaaagatcgttatgtttatcggcactttgcatcggccgcgctcccgattccggaagtgcttgacattggggaattcagcgagagcctgacctattgcatctcccgccgtgcacagggtgtcacgttgcaagacctgcctgaaaccgaactgcccgctgttctgcagccggtcgcggaggctatggatgcgatcgctgcggccgatcttagccagacgagcgggttcggcccattcggaccgcaaggaatcggtcaatacactacatggcgtgatttcatatgcgcgattgctgatccccatgtgtatcactggcaaactgtgatggacgacaccgtcagtgcgtccgtcgcgcaggctctcgatgagctgatgctttgggccgaggactgccccgaagtccggcacctcgtgcacgcggatttcggctccaacaatgtcctgacggacaatggccgcataacagcggtcattgactggagcgaggcgatgttcggggattcccaatacgaggtcgccaacatcttcttctggaggccgtggttggcttgtatggagcagcagacgcgctacttcgagcggaggcatccggagcttgcaggatcgccgcggctccgggcgtatatgctccgcattggtcttgaccaactctatcagagcttggttgacggcaatttcgatgatgcagcttgggcgcagggtcgatgcgacgcaatcgtccgatccggagccgggactgtcgggcgtacacaaatcgcccgcagaagcgcggccgtctggaccgatggctgtgtagaagtactcgccgatagtggaaaccgacgccccagcactcgtccgagggcaaaggaatagtgaggtacagcttggatcgatccggctgctaacaaagcccgaaaggaagctgagttggctgctgccaccgctgagcaataactagcataaccccttggggcctctaaacgggtcttgaggggttttttgctgaaaggaggaactatatccggatgatcgggcgcgccgtcgacggatccaactaaaaaaagctctcaaattacattttgagttgtttcaggttccattgccttattgctaaaactccaactaaaataacaaatagcacatgcaggtgcaaacaacacgttactctgatgaaggtgatgtgcctctagcagtctagcttatgaggctcgctgcttatcaacgattcatcattccccaagacgtgtacgcagattaaacaatggacaaaacttcaatcgattatagaataataattttaacagtgccgacttttttctgtaaacaaaaggccagaatcatatcgcacatcatcttgaatgcagtgtcgagtttggaccatttgagtacaaagccaatattgaatgatttttcgattttacatgtgtgaatcagacaaaagtgcatgcaatcacttgcaagtaaattaaggatactaatctattcctttcattttatatgctccacttttatataaaaaaatatacattattatatatgcattattaattattgcagtattatgctattggttttatggccctgctaaataacctaaatgagtctaactattgcatatgaatcaaatgaaggaagaatcatgatctaaacctgagtacccaatgcaataaaatgcgtcctattacctaaacttcaaacacacattgccatcggacgtataaattaatgcatatagattattttgagaaaagaaaacatcaaaagctctaaaacttcttttaactttgaaataagctgataaaaatacgctttaaatcaactgtgtgctgtatataagctgcaatttcacattttaccaaaccgaaacaagaatggtaacagtgaggcaaaaatttgaaaaatgtcctacttcacattcacatcaaattaattacaactaaataaataaacatcgtgattcaagcagtaatgaaagtcgaaatcagatagaatatacacgtttaacatcaattgaatttttttttaaatggatatatacaagtttactattttatatataatgaaaattcattttgtgttagcacaaaacttacagaaagagataaattttaaataaagagaattatatccaattttataatccaaaataatcaaattaaagaatattggctagatagaccggctttttcactgcccctgctggataatgaaaattcatatcaaaacaatacagaagttctagtttaataataaaaaagttggcaaactgtcattccctgttggtttttaagccaaatcacaattcaattacgtatcagaaattaatttaaaccaaatatatagctacgagggaacttcttcagtcattactagctagctcactaatcactatatatacgacatgctacaagtgaagtgaccatatcttaatttcaaatcataaaattcttccaccaagttgc

SEQ ID NO: 62 - DNA, 10866 bp, Artificial Sequence
  Plasmid pKS352
  misc_feature (9689)..(9689): n is a, c, g, or t
agcttggcgcgccgttctatagtgtcacctaaatcgtatgtgtatgatacataaggttatgtattaattgtagccgcgttctaacgacaatatgtccatatggtgcactctcagtacaatctgctctgatgccgcatagttaagccagccccgacacccgccaacacccgctgacgcgccctgacgggcttgtctgctcccggcatccgcttacagacaagctgtgaccgtctccgggagctgcatgtgtcagaggttttcaccgtcatcaccgaaacgcgcgagacgaaagggcctcgtgatacgcctatttttataggttaatgtcatgaccaaaatcccttaacgtgagttttcgttccactgagcgtcagaccccgtagaaaagatcaaaggatcttcttgagatcctttttttctgcgcgtaatctgctgcttgcaaacaaaaaaaccaccgctaccagcggtggtttgtttgccggatcaagagctaccaactctttttccgaaggtaactggcttcagcagagcgcagataccaaatactgtccttctagtgtagccgtagttaggccaccacttcaagaactctgtagcaccgcctacatacctcgctctgctaatcctgttaccagtggctgctgccagtggcgataagtcgtgtcttaccgggttggactcaagacgatagttaccggataaggcgcagcggtcgggctgaacggggggttcgtgcacacagcccagcttggagcgaacgacctacaccgaactgagatacctacagcgtgagcattgagaaagcgccacgcttcccgaagggagaaaggcggacaggtatccggtaagcggcagggtcggaacaggagagcgcacgagggagcttccagggggaaacgcctggtatctttatagtcctgtcgggtttcgccacctctgacttgagcgtcgatttttgtgatgctcgtcaggggggcggagcctatggaaaaacgccagcaacgcggcctttttacggttcctggccttttgctggccttttgctcacatgttctttcctgcgttatcccctgattctgtggataaccgtattaccgcctttgagtgagctgataccgctcgccgcagccgaacgaccgagcgcagcgagtcagtgagcgaggaagcggaagagcgcccaatacgcaaaccgcctctccccgcgcgttggccgattcattaatgcaggttgatcagattcgacatcgatctagtaacatagatgacaccgcgcgcgataatttatcctagtttgcgcgctatattttgttttctatcgcgtattaaatgtataattgcgggactctaatcataaaaacccatctcataaataacgtcatgcattacatgttaattattacatgcttaacgtaattcaacagaaattatatgataatcatcgcaagaccggcaacaggattcaatcttaagaaactttattgccaaatgtttgaacgatctgcttcgacgcactccttctttaggtacctcactattcctttgccctcggacgagtgctggggcgtcggtttccactatcggcgagtacttctacacagccatcggtccagacggccgcgcttctgcgggcgatttgtgtacgcccgacagtcccggctccggatcggacgattgcgtcgcatcgaccctgcgcccaagctgcatcatcgaaattgccgtcaaccaagctctgatagagttggtcaagaccaatgcggagcatatacgcccggagccgcggcgatcctgcaagctccggatgcctccgctcgaagtagcgcgtctgctgctccatacaagccaaccacggcctccagaagaagatgttggcgacctcgtattgggaatccccgaacatcgcctcgctccagtcaatgaccgctgttatgcggccattgtccgtcaggacattgttggagccgaaatccgcgtgcacgaggtgccggacttcggggcagtcctcggcccaaagcatcagctcatcgagagcctgcgcgacggacgcactgacggtgtcgtccatcacagtttgccagtgatacacatggggatcagcaatcgcgcatatgaaatcacgccatgtagtgtattgaccgattccttgcggtccgaatgggccgaacccgctcgtctggctaagatcggccgcagcgatcgcatccatggcctccgcgaccggctgcagaacagcgggcagttcggtttcaggcaggtcttgcaacgtgacaccctgtgcacggcgggagatgcaataggtcaggctctcgctgaattccccaatgtcaagcacttccggaatcgggagcgcggccgatgcaaagtgccgataaacataacgatctttgtagaaaccatcggcgcagctatttacccgcaggacatatccacgccctcctacatcgaagctgaaagcacgagattcttcgccctccgagagctgcatcaggtcggagacgctgtcgaacttttcgatcagaaacttctcgacagacgtcgcggtgagttcaggctttttcatggtttaataagaagagaaaagagttcttttgttatggctgaagtaatagagaaatgagctcgagcgtgtcctctccaaatgaaatgaacttccttatatagaggaagggtcttgcgaaggatagtgggattgtgcgtcatcccttacgtcagtggagatgtcacatcaatccacttgctttgaagacgtggttggaacgtcttctttttccacgatgctcctcgtgggtgggggtccatctttgggaccactgtcggcagaggcatcttgaatgatagcctttcctttatcgcaatgatggcatttgtaggagccaccttccttttctactgtcctttcgatgaagtgacagatagctgggcaatggaatccgaggaggtttcccgaaattatcctttgttgaaaagtctcaatagccctttggtcttctgagactgtatctttgacatttttggagtagaccagagtgtcgtgctccaccatgttgacgaagattttcttcttgtcattgagtcgtaaaagactctgtatgaactgttcgccagtcttcacggcgagttctgttagatcctcgatttgaatcttagactccatgcatggccttagattcagtaggaactacctttttagagactccaatctctattacttgccttggtttatgaagcaagccttgaatcgtccatactggaatagtacttctgatcttgagaaatatgtctttctctgtgttcttgatgcaattagtcctgaatcttttgactgcatctttaaccttcttgggaaggtatttgatctcctggagattgttactcgggtagatcgtcttgatgagacctgctgcgtaggcctctctaaccatctgtgggtcagcattctttctgaaattgaagaggctaaccttctcattatcagtggtgaacatagtgtcgtcaccttcaccttcgaacttccttcctagatcgtaaagatagaggaaatcgtccattgtaatctccggggcaaaggagatctcttttggggctggatcactgctgggccttttggttcctagcgtgagccagtgggctttttgctttggtgggcttgttagggccttagcaaagctcttgggcttgagttgagcttctcctttggggatgaagttcaacctgtctgtttgctgacttgttgtgtacgcgtcagctgctgctcttgcctctgtaatagtggcaaatttcttgtgtgcaactccgggaacgccgtttgttgccgcctttgtacaaccccagtcatcgtatataccggcatgtggaccgttatacacaacgtagtagttgatatgagggtgttgaatacccgattctgctctgagaggagcaactgtgctgttaagctcagatttttgtgggattggaattggatcgatctcgatcccgcgaaattaatacgactcactatagggagaccacaacggtttccctctagaaataattttgtttaactttaagaaggagatatacccatggaaaagcctgaactcaccgcgacgtctgtcgagaagtttctgatcgaaaagttcgacagcgtctccgacctgatgcagctctcggagggcgaagaatctcgtgctttcagcttcgatgtaggagggcgtggatatgtcctgcgggtaaatagctgcgccgatggtttctacaaagatcgttatgtttatcggcactttgcatcggccgcgctcccgattccggaagtgcttgacattggggaattcagcgagagcctgacctattgcatctcccgccgtgcacagggtgtcacgttgcaagacctgcctgaaaccgaactgcccgctgttctgcagccggtcgcggaggctatggatgcgatcgctgcggccgatcttagccagacgagcgggttcggcccattcggaccgcaaggaatcggtcaatacactacatggcgtgatttcatatgcgcgattgctgatccccatgtgtatcactggcaaactgtgatggacgacaccgtcagtgcgtccgtcgcgcaggctctcgatgagctgatgctttgggccgaggactgccccgaagtccggcacctcgtgcacgcggatttcggctccaacaatgtcctgacggacaatggccgcataacagcggtcattgactggagcgaggcgatgttcggggattcccaatacgaggtcgccaacatcttcttctggaggccgtggttggcttgtatggagcagcagacgcgctacttcgagcggaggcatccggagcttgcaggatcgccgcggctccgggcgtatatgctccgcattggtcttgaccaactctatcagagcttggttgacggcaatttcgatgatgcagcttgggcgcagggtcgatgcgacgcaatcgtccgatccggagccgggactgtcgggcgtacacaaatcgcccgcagaagcgcggccgtctggaccgatggctgtgtagaagtactcgccgatagtggaaaccgacgccccagcactcgtccgagggcaaaggaatagtgaggtacagcttggatcgatccggctgctaacaaagcccgaaaggaagctgagttggctgctgccaccgctgagcaataactagcataaccccttggggcctctaaacgggtcttgaggggttttttgctgaaaggaggaactatatccggatgatcgggcgcgccgtcgacggatccaactaaaaaaagctctcaaattacattttgagttgtttcaggttccattgccttattgctaaaactccaactaaaataacaaatagcacatgcaggtgcaaacaacacgttactctgatgaaggtgatgtgcctctagcagtctagcttatgaggctcgctgcttatcaacgattcatcattccccaagacgtgtacgcagattaaacaatggacaaaacttcaatcgattatagaataataattttaacagtgccgacttttttctgtaaacaaaaggccagaatcatatcgcacatcatcttgaatgcagtgtcgagtttggaccatttgagtacaaagccaatattgaatgatttttcgattttacatgtgtgaatcagacaaaagtgcatgcaatcacttgcaagtaaattaaggatactaatctattcctttcattttatatgctccacttttatataaaaaaatatacattattatatatgcattattaattattgcagtattatgctattggttttatggccctgctaaataacctaaatgagtctaactattgcatatgaatcaaatgaaggaagaatcatgatctaaacctgagtacccaatgcaataaaatgcgtcctattacctaaacttcaaacacacattgccatcggacgtataaattaatgcatatagattattttgagaaaagaaaacatcaaaagctctaaaacttcttttaactttgaaataagctgataaaaatacgctttaaatcaactgtgtgctgtatataagctgcaatttcacattttaccaaaccgaaacaagaatggtaacagtgaggcaaaaatttgaaaaatgtcctacttcacattcacatcaaattaattacaactaaataaataaacatcgtgattcaagcagtaatgaaagtcgaaatcagatagaatatacacgtttaacatcaattgaatttttttttaaatggatatatacaagtttactattttatatataatgaaaattcattttgtgttagcacaaaacttacagaaagagataaattttaaataaagagaattatatccaattttataatccaaaataatcaaattaaagaatattggctagatagaccggctttttcactgcccctgctggataatgaaaattcatatcaaaacaatacagaagttctagtttaataataaaaaagttggcaaactgtcattccctgttggtttttaagccaaatcacaattcaattacgtatcagaaattaatttaaaccaaatatatagctacgagggaacttcttcagtcattactagctagctcactaatcactatatatacgacatgctacaagtgaagtgaccatatcttaatttcaaatcataaaattcttccaccaagttgcggccgcaagtatgaactaaaatgcacgtaggtgtaagagctcatggagagcatggaatattgtatccgaccatgtaacagtataataactgagctccatctcacttcttctatgaataaacaaaggatgttatgatatattaacactctatctatgcaccttattgttctatgataaatttcctcttattattataaatcatctgaatcgtgacggcttatggaatgcttcaaatagtacaaaaacaaatgtgtactataagactttctaaacaattctaactttagcattgtgaacgagacataagtgttaagaagacataacaattataatggaagaagtttgtctccatttatatattatatattacccacttatgtattatattaggatgttaaggagacataacaattataaagagagaagtttgtatccatttatatattatatactacccatttatatattatacttatccacttatttaatgtctttataaggtttgatccatgatatttctaatattttagttgatatgtatatgaaagggtactatttgaactctcttactctgtataaaggttggatcatccttaaagtgggtctatttaattttattgcttcttacagataaaaaaaaaattatgagttggtttgataaaatattgaaggatttaaaataataataaataacatataatatatgtatataaatttattataatataacatttatctataaaaaagtaaatattgtcataaatctatacaatcgtttagccttgctggacgaatctcaattatttaaacgagagtaaacatatttgactttttggttatttaacaaattattatttaacactatatgaaatttttttttttatcagcaaagaataaaattaaattaaggaggacaatggtgtcccaatccttatacaaccaacttccacaagaaagtcaagtcagagacaacaaaaaaacaagcaaaggaaattttttaatttgagttgtcttgtttgctgcataatttatgcagtaaaacactacacataacccttttagcagtaaagcaatggttgaccgtgtgcttagcttcttttattttatttttttatcagcaaagaataaataaaataaaatgagacacttcagggatgtttcaacggatccaagctgatccactagttctagagcggcccgcgccgtcgacggatataatgagccgtaaacaaagatgattaagtagtaattaatacgtactagtaaaagtggcaaaagataacgagaaagaaccaatttctttgcattcggccttagcggaaggcatatataagctttgattattttatttagtgtaatgatttcgtacaaccaaagcatttatttagtactctcacacttgtgtcgcggccggccgctacaggaacaggtggtggcggccctcggcgcgctcgtactgctccacgatggtgtagtcctcgttgtgggaggtgatgtccagcttggagtccacgtagtagtagccgggcagctgcacgggcttcttggccatgtagatggacttgaactccaccaggtagtggccgccgtccttcagcttcagggccttgtggatctcgcccttcagcacgccgtcgcgggggtacaggcgctcggtggaggcctcccagcccatagtcttcttctgcattacggggccgtcggaggggaagttcacgccgatgaacttcaccttgtagatgaaggagccgtcctgcagggaggagtcctgggtcacggtcaccacgccgccgtcctcgaagttcatcacgcgctcccacttgaagccctcggggaaggacagcttcttgtagtcggggatgtcggcggggtgcttcacgtacaccttggagccgtactggaactggggggacaggatgtcccaggcgaagggcagggggccgcccttggtcaccttcagcttggcggtctgggtgccctcgtaggggcggccctcgccctcgccctcgatctcgaactcgtggccgttcacggagccctccatgcgcaccttgaagcgcatgaactccttgatgacgtcctcggaggaggccatgggccgcttggggggctatggaagactttcttagttagttgtgtgaataagcaatgttgggagaatcgggactacttataggataggaataaaacagaaaagtattaagtgctaatgaaatatttagactgataattaaaatcttcacgtatgtccacttgatataaaaacgtcaggaataaaggaagtacagtagaatttaaaggtactctttttatatatacccgtgttctctttttggctagctagttgcataaaaaataatctatatttttatcattattttaaatatcttatgagatggtaaatatttatcataattttttttactattatttattatttgtgtgtgtaatacatatagaagttaattacaaattttatttactttttcattattttgatatgattcaccattaatttagtgttattatttataatagttcattttaatctttttgtatatattatgcgtgcagtacttttttcctacatataactactattacattttatttatataatatttttattaatgaattttcgtgataatatgtaatattgttcattattatttcagattttttaaaaatatttgtgttattatttatgaaatatgtaatttttttagtatttgattttatgatgataaagtgttctaaattcaaaagaagggggaaagcgtaaacattaaaaaacgtcatcaaacaaaaacaaaatcttgttaataaagataaaactgtttgttttgatcactgttatttcgtaatataaaaacattatttatatttatattgttgacaaccaaatttgcctatcaaatctaaccaatataatgcatgcgtggcaggtaatgtactaccatgaacttaagtcatgacataataaaccgtgaatctgaccaatgcatgtacctanctaaattgtatttgtgacacgaagcaaatgattcaattcacaatggagatgggaaacaaataatgaagaacccagaactaagaaagcttttctgaaaaataaaataaaggcaatgtcaaaagtatactgcatcatcagtccagaaagcacatgatatttttttatcagtatcaatgcagctagttttattttacaatatcgatatagctagtttaaatatattgcagctagatttataaatatttgtgttattatttatcatttgtgtaatcctgtttttagtattttagtttatatatgatgataatgtattccaaatttaaaagaagggaaataaatttaaacaagaaaaaaagtcatcaaacaaaaaacaaatgaaagggtggaaagatgttaccatgtaatgtgaatgttacagtatttcttttattatagagttaacaaattaactaatatgattttgttaataatgataaaatattttttttattattatttcataatataaaaatagtttacttaatataaaaaaaattctatcgttcacaacaaagttggccacctaatttaaccatgcatgtacccatggaccatattaggtaaccatcaaacctgatgaagagataaagagatgaagacttaagtcataacacaaaaccataaaaaacaaaaatacaatcaaccgtcaatctgaccaatgcatgaaaaagctgcaatagtgagtggcgacacaaagcacatgattttcttacaacggagataaaaccaaaaaaatatttcatgaacaacctagaacaaataaagcttttatataataaatatataaataaataaaggctatggaataatatacttcaatatatttggattaaataaattgttggcggggttgatatatttatacacacctaaagtcacttcaatctcattttcacttaacttttattttttttttctttttatttatcataaagagaatattgataatatactttttaacatatttttatgacattttttattggtgaaaacttattaaaaatcataaattttgtaagttagatttatttaaagagttcctcttcttattttaaattttttaataaatttttaaataactaaaatttgtgttaaaaatgttaaaaaagtgtgttattaacccttctcttcgaggatc

SEQ ID NO: 63 - DNA, 12055 bp, Artificial Sequence
  Plasmid pKS364
agcttttgatccatgcccttcatttgccgcttattaattaatttggtaacagtccgtactaatcagttacttatccttcccccatcataattaatcttggtagtctcgaatgccacaacactgactagtctcttggatcataagaaaaagccaaggaacaaaagaagacaaaacacaatgagagtatcctttgcatagcaatgtctaagttcataaaattcaaacaaaaacgcaatcacacacagtggacatcacttatccactagctgatcaggatcgccgcgtcaagaaaaaaaaactggaccccaaaagccatgcacaacaacacgtactcacaaaggtgtcaatcgagcagcccaaaacattcaccaactcaacccatcatgagccctcacatttgttgtttctaacccaacctcaaactcgtattctcttccgccacctcatttttgtttatttcaacacccgtcaaactgcatgccaccccgtggccaaatgtccatgcatgttaacaagacctatgactataaatagctgcaatctcggcccaggttttcatcatcaagaaccagttcaatatcctagtacaccgtattaaagaatttaagatatactgcggccgcatgactatcgactcacaatactacaagtcgcgagacaaaaacgacacggcacccaaaatcgcgggaatccgatatgccccgctatcgacaccattactcaaccgatgtgagaccttctctctggtctggcacattttcagcattcccactttcctcacaattttcatgctatgctgcgcaattccactgctctggccatttgtgattgcgtatgtagtgtacgctgttaaagacgactccccgtccaacggaggagtggtcaagcgatactcgcctatttcaagaaacttcttcatctggaagctctttggccgctacttccccataactctgcacaagacggtggatctggagcccacgcacacatactaccctctggacgtccaggagtatcacctgattgctgagagatactggccgcagaacaagtacctccgagcaatcatctccaccatcgagtactttctgcccgccttcatgaaacggtctctttctatcaacgagcaggagcagcctgccgagcgagatcctctcctgtctcccgtttctcccagctctccgggttctcaacctgacaagtggattaaccacgacagcagatatagccgtggagaatcatctggctccaacggccacgcctcgggctccgaacttaacggcaacggcaacaatggcaccactaaccgacgacctttgtcgtccgcctctgctggctccactgcatctgattccacgcttcttaacgggtccctcaactcctacgccaaccagatcattggcgaaaacgacccacagctgtcgcccacaaaactcaagcccactggcagaaaatacatcttcggctaccacccccacggcattatcggcatgggagcctttggtggaattgccaccgagggagctggatggtccaagctctttccgggcatccctgtttctcttatgactctcaccaacaacttccgagtgcctctctacagagagtacctcatgagtctgggagtcgcttctgtctccaagaagtcctgcaaggccctcctcaagcgaaaccagtctatctgcattgtcgttggtggagcacaggaaagtcttctggccagacccggtgtcatggacctggtgctactcaagcgaaagggttttgttcgacttggtatggaggtcggaaatgtcgcccttgttcccatcatggcctttggtgagaacgacctctatgaccaggttagcaacgacaagtcgtccaagctgtaccgattccagcagtttgtcaagaacttccttggattcacccttcctttgatgcatgcccgaggcgtcttcaactacgatgtcggtcttgtcccctacaggcgacccgtcaacattgtggttggttcccccattgacttgccttatctcccacaccccaccgacgaagaagtgtccgaataccacgaccgatacatcgccgagctgcagcgaatctacaacgagcacaaggatgaatatttcatcgattggaccgaggagggcaaaggagccccagagttccgaatgattgagtaagcggccgcaagtatgaactaaaatgcatgtaggtgtaagagctcatggagagcatggaatattgtatccgaccatgtaacagtataataactgagctccatctcacttcttctatgaataaacaaaggatgttatgatatattaacactctatctatgcaccttattgttctatgataaatttcctcttattattataaatcatctgaatcgtgacggcttatggaatgcttcaaatagtacaaaaacaaatgtgtactataagactttctaaacaattctaaccttagcattgtgaacgagacataagtgttaagaagacataacaattataatggaagaagtttgtctccatttatatattatatattacccacttatgtattatattaggatgttaaggagacataacaattataaagagagaagtttgtatccatttatatattatatactacccatttatatattatacttatccacttatttaatgtctttataaggtttgatccatgatatttctaatattttagttgatatgtatatgaaagggtactatttgaactctcttactctgtataaaggttggatcatccttaaagtgggtctatttaattttattgcttcttacagataaaaaaaaaattatgagttggtttgataaaatattgaaggatttaaaataataataaataacatataatatatgtatataaatttattataatataacatttatctataaaaaagtaaatattgtcataaatctatacaatcgtttagccttgctggacgaatctcaattatttaaacgagagtaaacatatttgactttttggttatttaacaaattattatttaacactatatgaaatttttttttttatcagcaaagaataaaattaaattaagaaggacaatggtgtcccaatccttatacaaccaacttccacaagaaagtcaagtcagagacaacaaaaaaacaagcaaaggaaattttttaatttgagttgtcttgtttgctgcataatttatgcagtaaaacactacacataacccttttagcagtagagcaatggttgaccgtgtgcttagcttcttttattttatttttttatcagcaaagaataaataaaataaaatgagacacttcagggatgtttcaacaagcttggatcctagcctaagtacgtactcaaaatgccaacaaataaaaaaaaagttgctttaataatgccaaaacaaattaataaaacacttacaacaccggattttttttaattaaaatgtgccatttaggataaatagttaatatttttaataattatttaaaaagccgtatctactaaaatgatttttatttggttgaaaatattaatatgtttaaatcaacacaatctatcaaaattaaactaaaaaaaaaataagtgtacgtggttaacattagtacagtaatataagaggaaaatgagaaattaagaaattgaaagcgagtctaatttttaaattatgaacctgcatatataaaaggaaagaaagaatccaggaagaaaagaaatgaaaccatgcatggtcccctcgtcatcacgagtttctgccatttgcaatagaaacactgaaacacctttctctttgtcacttaattgagatgccgaagccacctcacaccatgaacttcatgaggtgtagcacccaaggcttccatagccatgcatactgaagaatgtctcaagctcagcaccctacttctgtgacgtgtccctcattcaccttcctctcttccctataaataaccacgcctcaggttctccgcttcacaactcaaacattctctccattggtccttaaacactcatcagtcatcaccatggaggtccgacgacgaaagatagacgtgctcaaggcccagaaaaacggctacgaatcgggcccaccatctcgacaatcgtcgcagccctcctcaagagcatcgtccagaacccgcaacaaacactcctcgtccaccctgtcgctcagcggactgaccatgaaagtccagaagaaacctgcgggacccccggcgaactccaaaacgccattcctacacatcaagcccgtgcacacgtgctgctccacatcaatgctttcgcgcgattatgacggctccaaccccagcttcaagggcttcaaaaacatcggcatgatcattctcattgtgggaaatctacggctcgcattcgaaaactacctcaaatacggcatttccaacccgttcttcgaccccaaaattactccttccgagtggcagctctcaggcttgctcatagtcgtggcctacgcacatatcctcatggcctacgctattgagagcgctgccaagctgctgttcctctctagcaaacaccactacatggccgtggggcttctgcataccatgaacactttgtcgtccatctcgttgctgtcctacgtcgtctactactacctgcccaaccccgtggcaggcacaatagtcgagtttgtggccgttattctgtctctcaaactcgcctcatacgccctcactaactcggatctccgaaaagccgcaattcatgcccagaagctcgacaagacgcaagacgataacgaaaaggaatccacctcgtcttcctcttcttcagatgacgcagagactttggcagacattgacgtcattcctgcatactacgcacagctgccctacccccagaatgtgacgctgtcgaacctgctgtacttctggtttgctcccacactggtctaccagcccgtgtaccccaagacggagcgtattcgacccaagcacgtgatccgaaacctgtttgagctcgtctctctgtgcatgcttattcagtttctcatcttccagtacgcctaccccatcatgcagtcgtgtctggctctgttcttccagcccaagctcgattatgccaacatctccgagcgcctcatgaagttggcctccgtgtctatgatggtctggctcattggattctacgctttcttccagaacggtctcaatcttattgccgagctcacctgttttggaaacagaaccttctaccagcagtggtggaattcccgctccattggccagtactggactctatggaacaagccagtcaaccagtactttagacaccacgtctacgtgcctcttctcgctcggggcatgtcgcggttcaatgcgtcggtggtggttttctttttctccgccgtcatccatgaactgcttgtcggcatccccactcacaacatcatcggagccgccttcttcggcatgatgtcgcaggtgcctctgatcatggctactgagaaccttcagcatattaactcctctctgggccccttccttggcaactgtgcattctggttcacctttttcctgggacaacccacttgtgcattcctttactatttggcctacaactacaagcagaaccagtagcggccgcaagtatgaactaaaatgcatgtaggtgtaagagctcatggagagcatggaatattgtatccgaccatgtaacagtataataactgagctccatctcacttcttctatgaataaacaaaggatgttatgatatattaacactctatctatgcaccttattgttctatgataaatttcctcttattattataaatcatctgaatcgtgacggcttatggaatgcttcaaatagtacaaaaacaaatgtgtactataagactttctaaacaattctaaccttagcattgtgaacgagacataagtgttaagaagacataacaattataatggaagaagtttgtctccatttatatattatatattacccacttatgtattatattaggatgttaaggagacataacaattataaagagagaagtttgtatccatttatatattatatactacccatttatatattatacttatccacttatttaatgtctttataaggtttgatccatgatatttctaatattttagttgatatgtatatgaaagggtactatttgaactctcttactctgtataaaggttggatcatccttaaagtgggtctatttaattttattgcttcttacagataaaaaaaaaattatgagttggtttgataaaatattgaaggatttaaaataataataaataacatataatatatgtatataaatttattataatataacatttatctataaaaaagtaaatattgtcataaatctatacaatcgtttagccttgctggacgaatctcaattatttaaacgagagtaaacatatttgactttttggttatttaacaaattattatttaacactatatgaaatttttttttttatcagcaaagaataaaattaaattaagaaggacaatggtgtcccaatccttatacaaccaacttccacaagaaagtcaagtcagagacaacaaaaaaacaagcaaaggaaattttttaatttgagttgtcttgtttgctgcataatttatgcagtaaaacactacacataacccttttagcagtagagcaatggttgaccgtgtgcttagcttcttttattttatttttttatcagcaaagaataaataaaataaaatgagacacttcagggatgtttcaacaagctctagactggaattcgtcgacggcgcgcccgatcatccggatatagttcctcctttcagcaaaaaacccctcaagacccgtttagaggccccaaggggttatgctagttattgctcagcggtggcagcagccaactcagcttcctttcgggctttgttagcagccggatcgatccaagctgtacctcactattcctttgccctcggacgagtgctggggcgtcggtttccactatcggcgagtacttctacacagccatcggtccagacggccgcgcttctgcgggcgatttgtgtacgcccgacagtcccggctccggatcggacgattgcgtcgcatcgaccctgcgcccaagctgcatcatcgaaattgccgtcaaccaagctctgatagagttggtcaagaccaatgcggagcatatacgcccggagccgcggcgatcctgcaagctccggatgcctccgctcgaagtagcgcgtctgctgctccatacaagccaaccacggcctccagaagaagatgttggcgacctcgtattgggaatccccgaacatcgcctcgctccagtcaatgaccgctgttatgcggccattgtccgtcaggacattgttggagccgaaatccgcgtgcacgaggtgccggacttcggggcagtcctcggcccaaagcatcagctcatcgagagcctgcgcgacggacgcactgacggtgtcgtccatcacagtttgccagtgatacacatggggatcagcaatcgcgcatatgaaatcacgccatgtagtgtattgaccgattccttgcggtccgaatgggccgaacccgctcgtctggctaagatcggccgcagcgatcgcatccatagcctccgcgaccggctgcagaacagcgggcagttcggtttcaggcaggtcttgcaacgtgacaccctgtgcacggcgggagatgcaataggtcaggctctcgctgaattccccaatgtcaagcacttccggaatcgggagcgcggccgatgcaaagtgccgataaacataacgatctttgtagaaaccatcggcgcagctatttacccgcaggacatatccacgccctcctacatcgaagctgaaagcacgagattcttcgccctccgagagctgcatcaggtcggagacgctgtcgaacttttcgatcagaaacttctcgacagacgtcgcggtgagttcaggcttttccatgggtatatctccttcttaaagttaaacaaaattatttctagagggaaaccgttgtggtctccctatagtgagtcgtattaatttcgcgggatcgagatcgatccaattccaatcccacaaaaatctgagcttaacagcacagttgctcctctcagagcagaatcgggtattcaacaccctcatatcaactactacgttgtgtataacggtccacatgccggtatatacgatgactggggttgtacaaaggcggcaacaaacggcgttcccggagttgcacacaagaaatttgccactattacagaggcaagagcagcagctgacgcgtacacaacaagtcagcaaacagacaggttgaacttcatccccaaaggagaagctcaactcaagcccaagagctttgctaaggccctaacaagcccaccaaagcaaaaagcccactggctcacgctaggaaccaaaaggcccagcagtgatccagccccaaaagagatctcctttgccccggagattacaatggacgatttcctctatctttacgatctaggaaggaagttcgaaggtgaaggtgacgacactatgttcaccactgataatgagaaggttagcctcttcaatttcagaaagaatgctgacccacagatggttagagaggcctacgcagcaggtctcatcaagacgatctacccgagtaacaatctccaggagatcaaataccttcccaagaaggttaaagatgcagtcaaaagattcaggactaattgcatcaagaacacagagaaagacatatttctcaagatcagaagtactattccagtatggacgattcaaggcttgcttcataaaccaaggcaagtaatagagattggagtctctaaaaaggtagttcctactgaatctaaggccatgcatggagtctaagattcaaatcgaggatctaacagaactcgccgtgaagactggcgaacagttcatacagagtcttttacgactcaatgacaagaagaaaatcttcgtcaacatggtggagcacgacactctggtctactccaaaaatgtcaaagatacagtctcagaagaccaaagggctattgagacttttcaacaaaggataatttcgggaaacctcctcggattccattgcccagctatctgtcacttcatcgaaaggacagtagaaaaggaaggtggctcctacaaatgccatcattgcgataaaggaaaggctatcattcaagatgcctctgccgacagtggtcccaaagatggacccccacccacgaggagcatcgtggaaaaagaagacgttccaaccacgtcttcaaagcaagtggattgatgtgacatctccactgacgtaagggatgacgcacaatcccactatccttcgcaagacccttcctctatataaggaagttcatttcatttggagaggacacgctcgagctcatttctctattacttcagccataacaaaagaactcttttctcttcttattaaaccatgaaaaagcctgaactcaccgcgacgtctgtcgagaagtttctgatcgaaaagttcgacagcgtctccgacctgatgcagctctcggagggcgaagaatctcgtgctttcagcttcgatgtaggagggcgtggatatgtcctgcgggtaaatagctgcgccgatggtttctacaaagatcgttatgtttatcggcactttgcatcggccgcgctcccgattccggaagtgcttgacattggggaattcagcgagagcctgacctattgcatctcccgccgtgcacagggtgtcacgttgcaagacctgcctgaaaccgaactgcccgctgttctgcagccggtcgcggaggccatggatgcgatcgctgcggccgatcttagccagacgagcgggttcggcccattcggaccgcaaggaatcggtcaatacactacatggcgtgatttcatatgcgcgattgctgatccccatgtgtatcactggcaaactgtgatggacgacaccgtcagtgcgtccgtcgcgcaggctctcgatgagctgatgctttgggccgaggactgccccgaagtccggcacctcgtgcacgcggatttcggctccaacaatgtcctgacggacaatggccgcataacagcggtcattgactggagcgaggcgatgttcggggattcccaatacgaggtcgccaacatcttcttctggaggccgtggttggcttgtatggagcagcagacgcgctacttcgagcggaggcatccggagcttgcaggatcgccgcggctccgggcgtatatgctccgcattggtcttgaccaactctatcagagcttggttgacggcaatttcgatgatgcagcttgggcgcagggtcgatgcgacgcaatcgtccgatccggagccgggactgtcgggcgtacacaaatcgcccgcagaagcgcggccgtctggaccgatggctgtgtagaagtactcgccgatagtggaaaccgacgccccagcactcgtccgagggcaaaggaatagtgaggtacctaaagaaggagtgcgtcgaagcagatcgttcaaacatttggcaataaagtttcttaagattgaatcctgttgccggtcttgcgatgattatcatataatttctgttgaattacgttaagcatgtaataattaacatgtaatgcatgacgttatttatgagatgggtttttatgattagagtcccgcaattatacatttaatacgcgatagaaaacaaaatatagcgcgcaaactaggataaattatcgcgcgcggtgtcatctatgttactagatcgatgtcgaatctgatcaacctgcattaatgaatcggccaacgcgcggggagaggcggtttgcgtattgggcgctcttccgcttcctcgctcactgactcgctgcgctcggtcgttcggctgcggcgagcggtatcagctcactcaaaggcggtaatacggttatccacagaatcaggggataacgcaggaaagaacatgtgagcaaaaggccagcaaaaggccaggaaccgtaaaaaggccgcgttgctggcgtttttccataggctccgcccccctgacgagcatcacaaaaatcgacgctcaagtcagaggtggcgaaacccgacaggactataaagataccaggcgtttccccctggaagctccctcgtgcgctctcctgttccgaccctgccgcttaccggatacctgtccgcctttctcccttcgggaagcgtggcgctttctcaatgctcacgctgtaggtatctcagttcggtgtaggtcgttcgctccaagctgggctgtgtgcacgaaccccccgttcagcccgaccgctgcgccttatccggtaactatcgtcttgagtccaacccggtaagacacgacttatcgccactggcagcagccactggtaacaggattagcagagcgaggtatgtaggcggtgctacagagttcttgaagtggtggcctaactacggctacactagaaggacagtatttggtatctgcgctctgctgaagccagttaccttcggaaaaagagttggtagctcttgatccggcaaacaaaccaccgctggtagcggtggtttttttgtttgcaagcagcagattacgcgcagaaaaaaaggatctcaagaagatcctttgatcttttctacggggtctgacgctcagtggaacgaaaactcacgttaagggattttggtcatgacattaacctataaaaataggcgtatcacgaggccctttcgtctcgcgcgtttcggtgatgacggtgaaaacctctgacacatgcagctcccggagacggtcacagcttgtctgtaagcggatgccgggagcagacaagcccgtcagggcgcgtcagcgggtgttggcgggtgtcggggctggcttaactatgcggcatcagagcagattgtactgagagtgcaccatatggacatattgtcgttagaacgcggctacaattaatacataaccttatgtatcatacacatacgatttaggtgacactatagaacggcgcgcca

SEQ ID NO: 64 - DNA, 1581 bp, Yarrowia lipolytica
atggaggtgcgcagacgcaagattgacgttctcaaggcccagaagaatggttacgagtccggcccaccatctagacagtcctctcagccatcctctagagcctcctccagaacacgcaacaagcactcctcctccacactttccctttccggcctcaccatgaaggtgcagaagaagccagctggtccaccagccaactccaagaccccattcctccacatcaagccagtgcacacttgctgctccacctcaatgctctccagagactacgacggctccaacccatccttcaagggcttcaagaacatcggcatgatcatcctcatcgtgggcaatcttcgcctcgccttcgagaactacctcaagtacggcatctccaaccccttcttcgaccccaagatcacaccctccgagtggcagctttctggacttctcatcgttgtggcttacgctcacatcctcatggcttacgctatcgagtccgctgccaagctcctcttcctctcctccaagcaccactacatggccgttggtctcctccacaccatgaacaccctctcctccatttccctcctctcctacgtggtgtactactacctccccaatccagtggctggcactatcgttgagttcgtggccgtgatcctttctctcaagctcgcttcctacgcccttaccaactccgatctcagaaaggctgccattcacgcccagaagctcgacaagacacaggacgacaacgagaaggagtccacctcctcttcctcttcctctgacgacgccgagacacttgccgacatcgacgttatcccagcttactacgctcagcttccctacccacagaacgttaccctctccaacctcctctacttctggttcgctcccacccttgtgtaccagcccgtttacccaaagacagagagaatccgccccaagcatgtgatccgcaacctcttcgagcttgtgtctctctgcatgctcatccagttcctcatcttccagtacgcctaccccatcatgcagtcttgccttgccctcttcttccagccaaagctcgactacgccaacatttccgagcgcctcatgaagctcgcctctgtgtccatgatggtgtggctcatcggtttctacgccttcttccagaacggtctcaacctcatcgccgagctcacctgcttcggtaaccgcacattctaccagcagtggtggaactccagatctattggccagtactggacactctggaacaagcccgtgaaccagtacttccgccatcacgtttacgttcctcttctcgctaggggcatgtccagattcaacgcctctgttgtggtgttcttcttctccgctgtgattcacgagctccttgtgggcattcccacacacaacatcatcggcgctgccttcttcggaatgatgtcccaggtgccacttatcatggccaccgagaaccttcagcacatcaactcctcccttggcccattccttggtaactgcgctttctggttcaccttcttccttggtcagcctacctgcgcctttctctactaccttgcctacaactacaagcagaaccagtag

SEQ ID NO: 65 - protein, 526 aa, Yarrowia lipolytica
MEVRRRKIDVLKAQKNGYESGPPSRQSSQPSSRASSRTRNKHSSSTLSLSGLTMKVQKKPAGPPANSKTPFLHIKPVHTCCSTSMLSRDYDGSNPSFKGFKNIGMIILIVGNLRLAFENYLKYGISNPFFDPKITPSEWQLSGLLIVVAYAHILMAYAIESAAKLLFLSSKHHYMAVGLLHTMNTLSSISLLSYVVYYYLPNPVAGTIVEFVAVILSLKLASYALTNSDLRKAAIHAQKLDKTQDDNEKESTSSSSSSDDAETLADIDVIPAYYAQLPYPQNVTLSNLLYFWFAPTLVYQPVYPKTERIRPKHVIRNLFELVSLCMLIQFLIFQYAYPIMQSCLALFFQPKLDYANISERLMKLASVSMMVWLIGFYAFFQNGLNLIAELTCFGNRTFYQQWWNSRSIGQYWTLWNKPVNQYFRHHVYVPLLARGMSRFNASVVVFFFSAVIHELLVGIPTHNIIGAAFFGMMSQVPLIMATENLQHINSSLGPFLGNCAFWFTFFLGQPTCAFLYYLAYNYKQNQ

SEQ ID NO: 66 - DNA, 1545 bp, Yarrowia lipolytica
atgaccatcgactcccagtactacaagtcccgcgacaagaacgacaccgctcccaagattgctggtatccgctacgctcctctgtctactccactcttgaaccgctgcgagactttctctttggtgtggcacatcttctccatccctaccttcctcaccatcttcatgctctgctgtgccattcccttgctctggcccttcgtgatcgcttacgttgtgtacgccgtgaaggatgactccccttccaacggcggtgttgtgaagcgctattcccctatctcccgcaacttcttcatctggaagctctttggccgctacttccccatcaccctccacaagaccgttgatttggagcccacccacacttactatcccttggacgtccaagagtaccacctgattgctgagcgctattggcctcagaacaagtacctgcgcgccatcattaccaccatcgagtacttcctgcccgctttcatgaagcgttccctctccatcaacgagcaggagcagcctgctgagagagaccctctgttgtctcccgtttccccctcttctcctggttctcagcccgacaagtggatcaaccatgattcccgctattccagaggtgagtcctctggctccaatggtcatgcttctggctctgaactgaatggcaatggcaacaacggcactaccaatcgccgccctctttcttctgcttccgctggctctactgcttctgactctaccttgctcaacggctctctcaactcctacgccaaccagatcattggcgagaacgaccctcagttgtctcccactaagctcaagcctactggcaggaagtacatcttcgggtaccatcctcacggtatcattgggatgggcgcctttggtggcattgctactgaaggtgctggctggtccaagctctttcctggtatccccgtttccctcatgaccctcaccaacaactttcgcgttcctctctatcgcgagtacctcatgtccctgggcgttgcttccgtttctaagaagtcctgtaaggccctcctcaagcgtaatcagtccatctgcatcgtggtgggtggtgcccaggaatccttgttggctaggcctggtgttatggatctcgtgttgctgaagcgcaagggttttgtgcgcttgggtatggaggtgggcaatgttgccctcgttccaatcatggctttcggcgagaacgatctctacgaccaggtgtccaacgacaagtcctccaagctgtaccgcttccagcagttcgtgaagaacttcctcggcttcaccctccctctcatgcatgccagaggtgtgttcaactacgatgttgggctcgttccctaccgccgccctgtgaacattgtggttggttctcctatcgacttgccttacctccctcatcccaccgatgaggaagtttccgagtaccacgaccgttacatcgctgagctccagcgcatctacaacgagcacaaggacgagtacttcatcgactggactgaggagggtaagggcgctcctgagtttcgtatgatcgagtag

SEQ ID NO: 67 - protein, 514 aa, Yarrowia lipolytica; identical to SEQ ID NO: 10

SEQ ID NO: 68 - DNA, 8638 bp, Artificial Sequence
  plasmid pKR1234
ggccgcaagtatgaactaaaatgcatgtaggtgtaagagctcatggagagcatggaatattgtatccgaccatgtaacagtataataactgagctccatctcacttcttctatgaataaacaaaggatgttatgatatattaacactctatctatgcaccttattgttctatgataaatttcctcttattattataaatcatctgaatcgtgacggcttatggaatgcttcaaatagtacaaaaacaaatgtgtactataagactttctaaacaattctaaccttagcattgtgaacgagacataagtgttaagaagacataacaattataatggaagaagtttgtctccatttatatattatatattacccacttatgtattatattaggatgttaaggagacataacaattataaagagagaagtttgtatccatttatatattatatactacccatttatatattatacttatccacttatttaatgtctttataaggtttgatccatgatatttctaatattttagttgatatgtatatgaaagggtactatttgaactctcttactctgtataaaggttggatcatccttaaagtgggtctatttaattttattgcttcttacagataaaaaaaaaattatgagttggtttgataaaatattgaaggatttaaaataataataaataacatataatatatgtatataaatttattataatataacatttatctataaaaaagtaaatattgtcataaatctatacaatcgtttagccttgctggacgaatctcaattatttaaacgagagtaaacatatttgactttttggttatttaacaaattattatttaacactatatgaaatttttttttttatcagcaaagaataaaattaaattaagaaggacaatggtgtcccaatccttatacaaccaacttccacaagaaagtcaagtcagagacaacaaaaaaacaagcaaaggaaattttttaatttgagttgtcttgtttgctgcataatttatgcagtaaaacactacacataacccttttagcagtagagcaatggttgaccgtgtgcttagcttcttttattttatttttttatcagcaaagaataaataaaataaaatgagacacttcagggatgtttcaacaagcttggcgcgccgttctatagtgtcacctaaatcgtatgtgtatgatacataaggttatgtattaattgtagccgcgttctaacgacaatatgtccatatggtgcactctcagtacaatctgctctgatgccgcatagttaagccagccccgacacccgccaacacccgctgacgcgccctgacgggcttgtctgctcccggcatccgcttacagacaagctgtgaccgtctccgggagctgcatgtgtcagaggttttcaccgtcatcaccgaaacgcgcgagacgaaagggcctcgtgatacgcctatttttataggttaatgtcatgaccaaaatcccttaacgtgagttttcgttccactgagcgtcagaccccgtagaaaagatcaaaggatcttcttgagatcctttttttctgcgcgtaatctgctgcttgcaaacaaaaaaaccaccgctaccagcggtggtttgtttgccggatcaagagctaccaactctttttccgaaggtaactggcttcagcagagcgcagataccaaatactgtccttctagtgtagccgtagttaggccaccacttcaagaactctgtagcaccgcctacatacctcgctctgctaatcctgttaccagtggctgctgccagtggcgataagtcgtgtcttaccgggttggactcaagacgatagttaccggataaggcgcagcggtcgggctgaacggggggttcgtgcacacagcccagcttggagcgaacgacctacaccgaactgagatacctacagcgtgagcattgagaaagcgccacgcttcccgaagggagaaaggcggacaggtatccggtaagcggcagggtcggaacaggagagcgcacgagggagcttccagggggaaacgcctggtatctttatagtcctgtcgggtttcgccacctctgacttgagcgtcgatttttgtgatgctcgtcaggggggcggagcctatggaaaaacgccagcaacgcggcctttttacggttcctggccttttgctggccttttgctcacatgttctttcctgcgttatcccctgattctgtggataaccgtattaccgcctttgagtgagctgataccgctcgccgcagccgaacgaccgagcgcagcgagtcagtgagcgaggaagcggaagagcgcccaatacgcaaaccgcctctccccgcgcgttggccgattcattaatgcaggttgatcgattcgacatcgatctagtaacatagatgacaccgcgcgcgataatttatcctagtttgcgcgctatattttgttttctatcgcgtattaaatgtataattgcgggactctaatcataaaaacccatctcataaataacgtcatgcattacatgttaattattacatgcttaacgtaattcaacagaaattatatgataatcatcgcaagaccggcaacaggattcaatcttaagaaactttattgccaaatgtttgaacgatctgcttcgacgcactccttctttaggtacctcactattcctttgccctcggacgagtgctggggcgtcggtttccactatcggcgagtacttctacacagccatcggtccagacggccgcgcttctgcgggcgatttgtgtacgcccgacagtcccggctccggatcggacgattgcgtcgcatcgaccctgcgcccaagctgcatcatcgaaattgccgtcaaccaagctctgatagagttggtcaagaccaatgcggagcatatacgcccggagccgcggcgatcctgcaagctccggatgcctccgctcgaagtagcgcgtctgctgctccatacaagccaaccacggcctccagaagaagatgttggcgacctcgtattgggaatccccgaacatcgcctcgctccagtcaatgaccgctgttatgcggccattgtccgtcaggacattgttggagccgaaatccgcgtgcacgaggtgccggacttcggggcagtcctcggcccaaagcatcagctcatcgagagcctgcgcgacggacgcactgacggtgtcgtccatcacagtttgccagtgatacacatggggatcagcaatcgcgcatatgaaatcacgccatgtagtgtattgaccgattccttgcggtccgaatgggccgaacccgctcgtctggctaagatcggccgcagcgatcgcatccatggcctccgcgaccggctgcagaacagcgggcagttcggtttcaggcaggtcttgcaacgtgacaccctgtgcacggcgggagatgcaataggtcaggctctcgctgaattccccaatgtcaagcacttccggaatcgggagcgcggccgatgcaaagtgccgataaacataacgatctttgtagaaaccatcggcgcagctatttacccgcaggacatatccacgccctcctacatcgaagctgaaagcacgagattcttcgccctccgagagctgcatcaggtcggagacgctgtcgaacttttcgatcagaaacttctcgacagacgtcgcggtgagttcaggctttttcatggtttaataagaagagaaaagagttcttttgttatggctgaagtaatagagaaatgagctcgagcgtgtcctctccaaatgaaatgaacttccttatatagaggaagggtcttgcgaaggatagtgggattgtgcgtcatcccttacgtcagtggagatgtcacatcaatccacttgctttgaagacgtggttggaacgtcttctttttccacgatgctcctcgtgggtgggggtccatctttgggaccactgtcggcagaggcatcttgaatgatagcctttcctttatcgcaatgatggcatttgtaggagccaccttccttttctactgtcctttcgatgaagtgacagatagctgggcaatggaatccgaggaggtttcccgaaattatcctttgttgaaaagtctcaatagccctttggtcttctgagactgtatctttgacatttttggagtagaccagagtgtcgtgctccaccatgttgacgaagattttcttcttgtcattgagtcgtaaaagactctgtatgaactgttcgccagtcttcacggcgagttctgttagatcctcgatttgaatcttagactccatgcatggccttagattcagtaggaactacctttttagagactccaatctctattacttgccttggtttatgaagcaagccttgaatcgtccatactggaatagtacttctgatcttgagaaatatgtctttctctgtgttcttgatgcaattagtcctgaatcttttgactgcatctttaaccttcttgggaaggtatttgatctcctggagattgttactcgggtagatcgtcttgatgagacctgctgcgtaggcctctctaaccatctgtgggtcagcattctttctgaaattgaagaggctaaccttctcattatcagtggtgaacatagtgtcgtcaccttcaccttcgaacttccttcctagatcgtaaagatagaggaaatcgtccattgtaatctccggggcaaaggagatctcttttggggctggatcactgctgggccttttggttcctagcgtgagccagtgggctttttgctttggtgggcttgttagggccttagcaaagctcttgggcttgagttgagcttctcctttggggatgaagttcaacctgtctgtttgctgacttgttgtgtacgcgtcagctgctgctcttgcctctgtaatagtggcaaatttcttgtgtgcaactccgggaacgccgtttgttgccgcctttgtacaaccccagtcatcgtatataccggcatgtggaccgttatacacaacgtagtagttgatatgagggtgttgaatacccgattctgctctgagaggagcaactgtgctgttaagctcagatttttgtgggattggaattggatcgatctcgatcccgcgaaattaatacgactcactatagggagaccacaacggtttccctctagaaataattttgtttaactttaagaaggagatatacccatggaaaagcctgaactcaccgcgacgtctgtcgagaagtttctgatcgaaaagttcgacagcgtctccgacctgatgcagctctcggagggcgaagaatctcgtgctttcagcttcgatgtaggagggcgtggatatgtcctgcgggtaaatagctgcgccgatggtttctacaaagatcgttatgtttatcggcactttgcatcggccgcgctcccgattccggaagtgcttgacattggggaattcagcgagagcctgacctattgcatctcccgccgtgcacagggtgtcacgttgcaagacctgcctgaaaccgaactgcccgctgttctgcagccggtcgcggaggctatggatgcgatcgctgcggccgatcttagccagacgagcgggttcggcccattcggaccgcaaggaatcggtcaatacactacatggcgtgatttcatatgcgcgattgctgatccccatgtgtatcactggcaaactgtgatggacgacaccgtcagtgcgtccgtcgcgcaggctctcgatgagctgatgctttgggccgaggactgccccgaagtccggcacctcgtgcacgcggatttcggctccaacaatgtcctgacggacaatggccgcataacagcggtcattgactggagcgaggcgatgttcggggattcccaatacgaggtcgccaacatcttcttctggaggccgtggttggcttgtatggagcagcagacgcgctacttcgagcggaggcatccggagcttgcaggatcgccgcggctccgggcgtatatgctccgcattggtcttgaccaactctatcagagcttggttgacggcaatttcgatgatgcagcttgggcgcagggtcgatgcgacgcaatcgtccgatccggagccgggactgtcgggcgtacacaaatcgcccgcagaagcgcggccgtctggaccgatggctgtgtagaagtactcgccgatagtggaaaccgacgccccagcactcgtccgagggcaaaggaatagtgaggtacagcttggatcgatccggctgctaacaaagcccgaaaggaagctgagttggctgctgccaccgctgagcaataactagcataaccccttggggcctctaaacgggtcttgaggggttttttgctgaaaggaggaactatatccggatgatcgggcgcgccgtcgacggatccgtacgagatccggccggccagatcctgcaggagatccaagcttttgatccatgcccttcatttgccgcttattaattaatttggtaacagtccgtactaatcagttacttatccttcccccatcataattaatcttggtagtctcgaatgccacaacactgactagtctcttggatcataagaaaaagccaaggaacaaaagaagacaaaacacaatgagagtatcctttgcatagcaatgtctaagttcataaaattcaaacaaaaacgcaatcacacacagtggacatcacttatccactagctgatcaggatcgccgcgtcaagaaaaaaaaactggaccccaaaagccatgcacaacaacacgtactcacaaaggtgtcaatcgagcagcccaaaacattcaccaactcaacccatcatgagccctcacatttgttgtttctaacccaacctcaaactcgtattctcttccgccacctcatttttgtttatttcaacacccgtcaaactgcatgccaccccgtggccaaatgtccatgcatgttaacaagacctatgactataaatagctgcaatctcggcccaggttttcatcatcaagaaccagttcaatatcctagtacaccgtattaaagaatttaagatatactgcggccgcatgactatcgactcacaatactacaagtcgcgagacaaaaacgacacggcacccaaaatcgcgggaatccgatatgccccgctatcgacaccattactcaaccgatgtgagaccttctctctggtctggcacattttcagcattcccactttcctcacaattttcatgctatgctgcgcaattccactgctctggccatttgtgattgcgtatgtagtgtacgctgttaaagacgactccccgtccaacggaggagtggtcaagcgatactcgcctatttcaagaaacttcttcatctggaagctctttggccgctacttccccataactctgcacaagacggtggatctggagcccacgcacacatactaccctctggacgtccaggagtatcacctgattgctgagagatactggccgcagaacaagtacctccgagcaatcatcaccaccatcgagtactttctgcccgccttcatgaaacggtctctttctatcaacgagcaggagcagcctgccgagcgagatcctctcctgtctcccgtttctcccagctctccgggttctcaacctgacaagtggattaaccacgacagcagatatagccgtggagaatcatctggctccaacggccacgcctcgggctccgaacttaacggcaacggcaacaacggcaccactaaccgacgacctttgtcgtccgcctctgctggctccactgcatctgattccacgcttcttaacgggtccctcaactcctacgccaaccagatcattggcgaaaacgacccacagctgtcgcccacaaaactcaagcccactggcagaaaatacatcttcggctaccacccccacggcattatcggcatgggagcctttggtggaattgccaccgagggagctggatggtccaagctctttccgggcatccctgtttctcttatgactctcaccaacaacttccgagtgcctctctacagagagtacctcatgagtctgggagtcgcttctgtctccaagaagtcctgcaaggccctcctcaagcgaaaccagtctatctgcattgtcgttggtggagcacaggaaagtcttctggccagacccggtgtcatggacctggtgctactcaagcgaaagggttttgttcgacttggtatggaggtcggaaatgtcgcccttgttcccatcatggcctttggtgagaacgacctctatgaccaggttagcaacgacaagtcgtccaagctgtaccgattccagcagtttgtcaagaacttccttggattcacccttcctttgatgcatgcccgaggcgtcttcaactacgatgtcggtcttgtcccctacaggcgacccgtcaacattgtggttggttcccccattgacttgccttatctcccacaccccaccgacgaagaagtgtccgaataccacgaccgatacatcgccgagctgcagcgaatctacaacgagcacaaggatgaatatttcatcgattggaccgaggagggcaaaggagccccagagttccgaatgattgagtaagc

SEQ ID NO: 69 - DNA, 21 bp, Artificial Sequence
  primer oSGly-2
aagcggccgcggtgatgactg

SEQ ID NO: 70 - DNA, 32 bp, Artificial Sequence
  primer oSGly-3
taagcttcgtacgctagcctaagtacgtactc

SEQ ID NO: 71 - DNA, 3673 bp, Artificial Sequence
  plasmid pPSgly32
gggctagagcggccgccaccgcggtggagctccagcttttgttccctttagtgagggttaattgcgcgcttggcgtaatcatggtcatagctgtttcctgtgtgaaattgttatccgctcacaattccacacaacatacgagccggaagcataaagtgtaaagcctggggtgcctaatgagtgagctaactcacattaattgcgttgcgctcactgcccgctttccagtcgggaaacctgtcgtgccagctgcattaatgaatcggccaacgcgcggggagaggcggtttgcgtattgggcgctcttccgcttcctcgctcactgactcgctgcgctcggtcgttcggctgcggcgagcggtatcagctcactcaaaggcggtaatacggttatccacagaatcaggggataacgcaggaaagaacatgtgagcaaaaggccagcaaaaggccaggaaccgtaaaaaggccgcgttgctggcgtttttccataggctccgcccccctgacgagcatcacaaaaatcgacgctcaagtcagaggtggcgaaacccgacaggactataaagataccaggcgtttccccctggaagctccctcgtgcgctctcctgttccgaccctgccgcttaccggatacctgtccgcctttctcccttcgggaagcgtggcgctttctcatagctcacgctgtaggtatctcagttcggtgtaggtcgttcgctccaagctgggctgtgtgcacgaaccccccgttcagcccgaccgctgcgccttatccggtaactatcgtcttgagtccaacccggtaagacacgacttatcgccactggcagcagccactggtaacaggattagcagagcgaggtatgtaggcggtgctacagagttcttgaagtggtggcctaactacggctacactagaaggacagtatttggtatctgcgctctgctgaagccagttaccttcggaaaaagagttggtagctcttgatccggcaaacaaaccaccgctggtagcggtggtttttttgtttgcaagcagcagattacgcgcagaaaaaaaggatctcaagaagatcctttgatcttttctacggggtctgacgctcagtggaacgaaaactcacgttaagggattttggtcatgagattatcaaaaaggatcttcacctagatccttttaaattaaaaatgaagttttaaatcaatctaaagtatatatgagtaaacttggtctgacagttaccaatgcttaatcagtgaggcacctatctcagcgatctgtctatttcgttcatccatagttgcctgactccccgtcgtgtagataactacgatacgggagggcttaccatctggccccagtgctgcaatgataccgcgagacccacgctcaccggctccagatttatcagcaataaaccagccagccggaagggccgagcgcagaagtggtcctgcaactttatccgcctccatccagtctattaattgttgccgggaagctagagtaagtagttcgccagttaatagtttgcgcaacgttgttgccattgctacaggcatcgtggtgtcacgctcgtcgtttggtatggcttcattcagctccggttcccaacgatcaaggcgagttacatgatcccccatgttgtgcaaaaaagcggttagctccttcggtcctccgatcgttgtcagaagtaagttggccgcagtgttatcactcatggttatggcagcactgcataattctcttactgtcatgccatccgtaagatgcttttctgtgactggtgagtactcaaccaagtcattctgagaatagtgtatgcggcgaccgagttgctcttgcccggcgtcaatacgggataataccgcgccacatagcagaactttaaaagtgctcatcattggaaaacgttcttcggggcgaaaactctcaaggatcttaccgctgttgagatccagttcgatgtaacccactcgtgcacccaactgatcttcagcatcttttactttcaccagcgtttctgggtgagcaaaaacaggaaggcaaaatgccgcaaaaaagggaataagggcgacacggaaatgttgaatactcatactcttcctttttcaatattattgaagcatttatcagggttattgtctcatgagcggatacatatttgaatgtatttagaaaaataaacaaataggggttccgcgcacatttccccgaaaagtgccacctaaattgtaagcgttaatattttgttaaaattcgcgttaaatttttgttaaatcagctcattttttaaccaataggccgaaatcggcaaaatcccttataaatcaaaagaatagaccgagatagggttgagtgttgttccagtttggaacaagagtccactattaaagaacgtggactccaacgtcaaagggcgaaaaaccgtctatcagggcgatggcccactacgtgaaccatcaccctaatcaagttttttggggtcgaggtgccgtaaagcactaaatcggaaccctaaagggagcccccgatttagagcttgacggggaaagccggcgaacgtggcgagaaaggaagggaagaaagcgaaaggagcgggcgctagggcgctggcaagtgtagcggtcacgctgcgcgtaaccaccacacccgccgcgcttaatgcgccgctacagggcgcgtcccattcgccattcaggctgcgcaactgttgggaagggcgatcggtgcgggcctcttcgctattacgccagctggcgaaagggggatgtgctgcaaggcgattaagttgggtaacgccagggttttcccagtcacgacgttgtaaaacgacggccagtgagcgcgcgtaatacgactcactatagggcgaattgggtaccgggccccccctcgaggtcgacggtatcgataagcttgatatcgaattcctgcagcccgggggatccgccctaagcttcgtacgctagcctaagtacgtactcaaaatgccaacaaataaaaaaaaagttgctttaataatgccaaaacaaattaataaaacacttacaacaccggattttttttaattaaaatgtgccatttaggataaatagttaatatttttaataattatttaaaaagccgtatctactaaaatgatttttatttggttgaaaatattaatatgtttaaatcaacacaatctatcaaaattaaactaaaaaaaaaataagtgtacgtggttaacattagtacagtaatataagaggaaaatgagaaattaagaaattgaaagcgagtctaatttttaaattatgaacctgcatatataaaaggaaagaaagaatccaggaagaaaagaaatgaaaccatgcatggtcccctcgtcatcacgagtttctgccatttgcaatagaaacactgaaacacctttctctttgtcacttaattgagatgccgaagccacctcacaccatgaacttcatgaggtgtagcacccaaggcttccatagccatgcatactgaagaatgtctcaagctcagcaccctacttctgtgacgtgtccctcattcaccttcctctcttccctataaataaccacgcctcaggttctccgcttcacaactcaaacattctctccattggtccttaaacactcatcagtcatcaccgcggccgctt

SEQ ID NO: 72 - DNA, 4171 bp, Artificial Sequence
  plasmid pKR264
gcccgggggatccgccctaagcttcgtacgctagcctaagtacgtactcaaaatgccaacaaataaaaaaaaagttgctttaataatgccaaaacaaattaataaaacacttacaacaccggattttttttaattaaaatgtgccatttaggataaatagttaatatttttaataattatttaaaaagccgtatctactaaaatgatttttatttggttgaaaatattaatatgtttaaatcaacacaatctatcaaaattaaactaaaaaaaaaataagtgtacgtggttaacattagtacagtaatataagaggaaaatgagaaattaagaaattgaaagcgagtctaatttttaaattatgaacctgcatatataaaaggaaagaaagaatccaggaagaaaagaaatgaaaccatgcatggtcccctcgtcatcacgagtttctgccatttgcaatagaaacactgaaacacctttctctttgtcacttaattgagatgccgaagccacctcacaccatgaacttcatgaggtgtagcacccaaggcttccatagccatgcatactgaagaatgtctcaagctcagcaccctacttctgtgacgtgtccctcattcaccttcctctcttccctataaataaccacgcctcaggttctccgcttcacaactcaaacattctctccattggtccttaaacactcatcagtcatcaccgcggccgcatttcgcaccaaatcaatgaaagtaataatgaaaagtctgaataagaatacttaggcttagatgcctttgttacttgtgtaaaataacttgagtcatgtacctttggcggaaacagaataaataaaaggtgaaattccaatgctctatgtataagttagtaatacttaatgtgttctacggttgtttcaatatcatcaaactctaattgaaactttagaaccacaaatctcaatcttttcttaatgaaatgaaaaatcttaattgtaccatgtttatgttaaacaccttacaattggttggagaggaggaccaaccgatgggacaacattgggagaaagagattcaatggagatttggataggagaacaacattctttttcacttcaatacaagatgagtgcaacactaaggatatgtatgagactttcagaagctacgacaacatagatgagtgaggtggtgattcctagcaagaaagacattagaggaagccaaaatcgaacaaggaagacatcaagggcaagagacaggaccatccatctcaggaaaaggagctttgggatagtccgagaagttgtacaagaaattttttggagggtgagtgatgcattgctggtgactttaactcaatcaaaattgagaaagaaagaaaagggagggggctcacatgtgaatagaagggaaacgggagaattttacagttttgatctaatgggcatcccagctagtggtaacatattcaccatgtttaaccttcacgtacgtctagaggatccccgggtaccgagctcgaattcactggccgtcgttttacaacgtcgtgactgggaaaaccctggcgttacccaacttaatcgccttgcagcacatccccctttcgccagctggcgtaatagcgaagaggcccgcaccgatcgcccttcccaacagttgcgcagcctgaatggcgaatggcgcctgatgcggtattttctccttacgcatctgtgcggtatttcacaccgcatatggtgcactctcagtacaatctgctctgatgccgcatagttaagccagccccgacacccgccaacacccgctgacgcgccctgacgggcttgtctgctcccggcatccgcttacagacaagctgtgaccgtctccgggagctgcatgtgtcagaggttttcaccgtcatcaccgaaacgcgcgagacgaaagggcctcgtgatacgcctatttttataggttaatgtcatgataataatggtttcttagacgtcaggtggcacttttcggggaaatgtgcgcggaacccctatttgtttatttttctaaatacattcaaatatgtatccgctcatgagacaataaccctgataaatgcttcaataatattgaaaaaggaagagtatgagtattcaacatttccgtgtcgcccttattcccttttttgcggcattttgccttcctgtttttgctcacccagaaacgctggtgaaagtaaaagatgctgaagatcagttgggtgcacgagtgggttacatcgaactggatctcaacagcggtaagatccttgagagttttcgccccgaagaacgttttccaatgatgagcacttttaaagttctgctatgtggcgcggtattatcccgtattgacgccgggcaagagcaactcggtcgccgcatacactattctcagaatgacttggttgagtactcaccagtcacagaaaagcatcttacggatggcatgacagtaagagaattatgcagtgctgccataaccatgagtgataacactgcggccaacttacttctgacaacgatcggaggaccgaaggagctaaccgcttttttgcacaacatgggggatcatgtaactcgccttgatcgttgggaaccggagctgaatgaagccataccaaacgacgagcgtgacaccacgatgcctgtagcaatggcaacaacgttgcgcaaactattaactggcgaactacttactctagcttcccggcaacaattaatagactggatggaggcggataaagttgcaggaccacttctgcgctcggcccttccggctggctggtttattgctgataaatctggagccggtgagcgtgggtctcgcggtatcattgcagcactggggccagatggtaagccctcccgtatcgtagttatctacacgacggggagtcaggcaactatggatgaacgaaatagacagatcgctgagataggtgcctcactgattaagcattggtaactgtcagaccaagtttactcatatatactttagattgatttaaaacttcatttttaatttaaaaggatctaggtgaagatcctttttgataatctcatgaccaaaatcccttaacgtgagttttcgttccactgagcgtcagaccccgtagaaaagatcaaaggatcttcttgagatcctttttttctgcgcgtaatctgctgcttgcaaacaaaaaaaccaccgctaccagcggtggtttgtttgccggatcaagagctaccaactctttttccgaaggtaactggcttcagcagagcgcagataccaaatactgtccttctagtgtagccgtagttaggccaccacttcaagaactctgtagcaccgcctacatacctcgctctgctaatcctgttaccagtggctgctgccagtggcgataagtcgtgtcttaccgggttggactcaagacgatagttaccggataaggcgcagcggtcgggctgaacggggggttcgtgcacacagcccagcttggagcgaacgacctacaccgaactgagatacctacagcgtgagctatgagaaagcgccacgcttcccgaagggagaaaggcggacaggtatccggtaagcggcagggtcggaacaggagagcgcacgagggagcttccagggggaaacgcctggtatctttatagtcctgtcgggtttcgccacctctgacttgagcgtcgatttttgtgatgctcgtcaggggggcggagcctatggaaaaacgccagcaacgcggcctttttacggttcctggccttttgctggccttttgctcacatgttctttcctgcgttatcccctgattctgtggataaccgtattaccgcctttgagtgagctgataccgctcgccgcagccgaacgaccgagcgcagcgagtcagtgagcgaggaagcggaagagcgcccaatacgcaaaccgcctctccccgcgcgttggccgattcattaatgcagctggcacgacaggtttcccgactggaaagcgggcagtgagcgcaacgcaattaatgtgagttagctcactcattaggcaccccaggctttacactttatgcttccggctcgtatgttgtgtggaattgtgagcggataacaatttcacacaggaaacagctatgaccatgattacgccaagcttgcatgcctgca

SEQ ID NO: 73 - DNA, 6130 bp, Artificial Sequence
  plasmid pKR1212
ctagaggatcccccgggctgcaggaattcactggccgtcgttttacaacgtcgtgactgggaaaaccctggcgttacccaacttaatcgccttgcagcacatccccctttcgccagctggcgtaatagcgaagaggcccgcaccgatcgcccttcccaacagttgcgcagcctgaatggcgaatggcgcctgatgcggtattttctccttacgcatctgtgcggtatttcacaccgcatatggtgcactctcagtacaatctgctctgatgccgcatagttaagccagccccgacacccgccaacacccgctgacgcgccctgacgggcttgtctgctcccggcatccgcttacagacaagctgtgaccgtctccgggagctgcatgtgtcagaggttttcaccgtcatcaccgaaacgcgcgagacgaaagggcctcgtgatacgcctatttttataggttaatgtcatgataataatggtttcttagacgtcaggtggcacttttcggggaaatgtgcgcggaacccctatttgtttatttttctaaatacattcaaatatgtatccgctcatgagacaataaccctgataaatgcttcaataatattgaaaaaggaagagtatgagtattcaacatttccgtgtcgcccttattcccttttttgcggcattttgccttcctgtttttgctcacccagaaacgctggtgaaagtaaaagatgctgaagatcagttgggtgcacgagtgggttacatcgaactggatctcaacagcggtaagatccttgagagttttcgccccgaagaacgttttccaatgatgagcacttttaaagttctgctatgtggcgcggtattatcccgtattgacgccgggcaagagcaactcggtcgccgcatacactattctcagaatgacttggttgagtactcaccagtcacagaaaagcatcttacggatggcatgacagtaagagaattatgcagtgctgccataaccatgagtgataacactgcggccaacttacttctgacaacgatcggaggaccgaaggagctaaccgcttttttgcacaacatgggggatcatgtaactcgccttgatcgttgggaaccggagctgaatgaagccataccaaacgacgagcgtgacaccacgatgcctgtagcaatggcaacaacgttgcgcaaactattaactggcgaactacttactctagcttcccggcaacaattaatagactggatggaggcggataaagttgcaggaccacttctgcgctcggcccttccggctggctggtttattgctgataaatctggagccggtgagcgtgggtctcgcggtatcattgcagcactggggccagatggtaagccctcccgtatcgtagttatctacacgacggggagtcaggcaactatggatgaacgaaatagacagatcgctgagataggtgcctcactgattaagcattggtaactgtcagaccaagtttactcatatatactttagattgatttaaaacttcatttttaatttaaaaggatctaggtgaagatcctttttgataatctcatgaccaaaatcccttaacgtgagttttcgttccactgagcgtcagaccccgtagaaaagatcaaaggatcttcttgagatcctttttttctgcgcgtaatctgctgcttgcaaacaaaaaaaccaccgctaccagcggtggtttgtttgccggatcaagagctaccaactctttttccgaaggtaactggcttcagcagagcgcagataccaaatactgtccttctagtgtagccgtagttaggccaccacttcaagaactctgtagcaccgcctacatacctcgctctgctaatcctgttaccagtggctgctgccagtggcgataagtcgtgtcttaccgggttggactcaagacgatagttaccggataaggcgcagcggtcgggctgaacggggggttcgtgcacacagcccagcttggagcgaacgacctacaccgaactgagatacctacagcgtgagctatgagaaagcgccacgcttcccgaagggagaaaggcggacaggtatccggtaagcggcagggtcggaacaggagagcgcacgagggagcttccagggggaaacgcctggtatctttatagtcctgtcgggtttcgccacctctgacttgagcgtcgatttttgtgatgctcgtcaggggggcggagcctatggaaaaacgccagcaacgcggcctttttacggttcctggccttttgctggccttttgctcacatgttctttcctgcgttatcccctgattctgtggataaccgtattaccgcctttgagtgagctgataccgctcgccgcagccgaacgaccgagcgcagcgagtcagtgagcgaggaagcggaagagcgcccaatacgcaaaccgcctctccccgcgcgttggccgattcattaatgcagctggcacgacaggtttcccgactggaaagcgggcagtgagcgcaacgcaattaatgtgagttagctcactcattaggcaccccaggctttacactttatgcttccggctcgtatgttgtgtggaattgtgagcggataacaatttcacacaggaaacagctatgaccatgattacgccaagcttgcatgcctgcaggctagcctaagtacgtactcaaaatgccaacaaataaaaaaaaagttgctttaataatgccaaaacaaattaataaaacacttacaacaccggattttttttaattaaaatgtgccatttaggataaatagttaatatttttaataattatttaaaaagccgtatctactaaaatgatttttatttggttgaaaatattaatatgtttaaatcaacacaatctatcaaaattaaactaaaaaaaaaataagtgtacgtggttaacattagtacagtaatataagaggaaaatgagaaattaagaaattgaaagcgagtctaatttttaaattatgaacctgcatatataaaaggaaagaaagaatccaggaagaaaagaaatgaaaccatgcatggtcccctcgtcatcacgagtttctgccatttgcaatagaaacactgaaacacctttctctttgtcacttaattgagatgccgaagccacctcacaccatgaacttcatgaggtgtagcacccaaggcttccatagccatgcatactgaagaatgtctcaagctcagcaccctacttctgtgacgtgtccctcattcaccttcctctcttccctataaataaccacgcctcaggttctccgcttcacaactcaaacattctctccattggtccttaaacactcatcagtcatcaccgcggccgcaaaccatggaggtccgacgacgaaagatagacgtgctcaaggcccagaaaaacggctacgaatcgggcccaccatctcgacaatcgtcgcagccctcctcaagagcatcgtccagaacccgcaacaaacactcctcgtccaccctgtcgctcagcggactgaccatgaaagtccagaagaaacctgcgggacccccggcgaactccaaaacgccattcctacacatcaagcccgtgcacacgtgctgctccacatcaatgctttcgcgcgattatgacggctccaaccccagcttcaagggcttcaaaaacatcggcatgatcattctcattgtgggaaatctacggctcgcattcgaaaactacctcaaatacggcatttccaacccgttcttcgaccccaaaattactccttccgagtggcagctctcaggcttgctcatagtcgtggcctacgcacatatcctcatggcctacgctattgagagcgctgccaagctgctgttcctctctagcaaacaccactacatggccgtggggcttctgcataccatgaacactttgtcgtccatctcgttgctgtcctacgtcgtctactactacctgcccaaccccgtggcaggcacaatagtcgagtttgtggccgttattctgtctctcaaactcgcctcatacgccctcactaactcggatctccgaaaagccgcaattcatgcccagaagctcgacaagacgcaagacgataacgaaaaggaatccacctcgtcttcctcttcttcagatgacgcagagactttggcagacattgacgtcattcctgcatactacgcacagctgccctacccccagaatgtgacgctgtcgaacctgctgtacttctggtttgctcccacactggtctaccagcccgtgtaccccaagacggagcgtattcgacccaagcacgtgatccgaaacctgtttgagctcgtctctctgtgcatgcttattcagtttctcatcttccagtacgcctaccccatcatgcagtcgtgtctggctctgttcttccagcccaagctcgattatgccaacatctccgagcgcctcatgaagttggcctccgtgtctatgatggtctggctcattggattctacgctttcttccagaacggtctcaatcttattgccgagctcacctgttttggaaacagaaccttctaccagcagtggtggaattcccgctccattggccagtactggactctatggaacaagccagtcaaccagtactttagacaccacgtctacgtgcctcttctcgctcggggcatgtcgcggttcaatgcgtcggtggtggttttctttttctccgccgtcatccatgaactgcttgtcggcatccccactcacaacatcatcggagccgccttcttcggcatgatgtcgcaggtgcctctgatcatggctactgagaaccttcagcatattaactcctctctgggccccttccttggcaactgtgcattctggttcacctttttcctgggacaacccacttgtgcattcctttactatttggcctacaactacaagcagaaccagtagcggccgcaagtatgaactaaaatgcatgtaggtgtaagagctcatggagagcatggaatattgtatccgaccatgtaacagtataataactgagctccatctcacttcttctatgaataaacaaaggatgttatgatatattaacactctatctatgcaccttattgttctatgataaatttcctcttattattataaatcatctgaatcgtgacggcttatggaatgcttcaaatagtacaaaaacaaatgtgtactataagactttctaaacaattctaaccttagcattgtgaacgagacataagtgttaagaagacataacaattataatggaagaagtttgtctccatttatatattatatattacccacttatgtattatattaggatgttaaggagacataacaattataaagagagaagtttgtatccatttatatattatatactacccatttatatattatacttatccacttatttaatgtctttataaggtttgatccatgatatttctaatattttagttgatatgtatatgaaagggtactatttgaactctcttactctgtataaaggttggatcatccttaaagtgggtctatttaattttattgcttcttacagataaaaaaaaaattatgagttggtttgataaaatattgaaggatttaaaataataataaataacatataatatatgtatataaatttattataatataacatttatctataaaaaagtaaatattgtcataaatctatacaatcgtttagccttgctggacgaatctcaattatttaaacgagagtaaacatatttgactttttggttatttaacaaattattatttaacactatatgaaatttttttttttatcagcaaagaataaaattaaattaagaaggacaatggtgtcccaatccttatacaaccaacttccacaagaaagtcaagtcagagacaacaaaaaaacaagcaaaggaaattttttaatttgagttgtcttgtttgctgcataatttatgcagtaaaacactacacataacccttttagcagtagagcaatggttgaccgtgtgcttagcttcttttattttatttttttatcagcaaagaataaataaaataaaatgagacacttcagggatgtttcaacaagct

SEQ ID NO: 74 - DNA, 5764 bp, Artificial Sequence
  plasmid pKR1235
ggccgcatttcgcaccaaatcaatgaaagtaataatgaaaagtctgaataagaatacttaggcttagatgcctttgttacttgtgtaaaataacttgagtcatgtacctttggcggaaacagaataaataaaaggtgaaattccaatgctctatgtataagttagtaatacttaatgtgttctacggttgtttcaatatcatcaaactctaattgaaactttagaaccacaaatctcaatcttttcttaatgaaatgaaaaatcttaattgtaccatgtttatgttaaacaccttacaattggttggagaggaggaccaaccgatgggacaacattgggagaaagagattcaatggagatttggataggagaacaacattctttttcacttcaatacaagatgagtgcaacactaaggatatgtatgagactttcagaagctacgacaacatagatgagtgaggtggtgattcctagcaagaaagacattagaggaagccaaaatcgaacaaggaagacatcaagggcaagagacaggaccatccatctcaggaaaaggagctttgggatagtccgagaagttgtacaagaaattttttggagggtgagtgatgcattgctggtgactttaactcaatcaaaattgagaaagaaagaaaagggagggggctcacatgtgaatagaagggaaacgggagaattttacagttttgatctaatgggcatcccagctagtggtaacatattcaccatgtttaaccttcacgtacgtctagaggatccccgggtaccgagctcgaattcactggccgtcgttttacaacgtcgtgactgggaaaaccctggcgttacccaacttaatcgccttgcagcacatccccctttcgccagctggcgtaatagcgaagaggcccgcaccgatcgcccttcccaacagttgcgcagcctgaatggcgaatggcgcctgatgcggtattttctccttacgcatctgtgcggtatttcacaccgcatatggtgcactctcagtacaatctgctctgatgccgcatagttaagccagccccgacacccgccaacacccgctgacgcgccctgacgggcttgtctgctcccggcatccgcttacagacaagctgtgaccgtctccgggagctgcatgtgtcagaggttttcaccgtcatcaccgaaacgcgcgagacgaaagggcctcgtgatacgcctatttttataggttaatgtcatgataataatggtttcttagacgtcaggtggcacttttcggggaaatgtgcgcggaacccctatttgtttatttttctaaatacattcaaatatgtatccgctcatgagacaataaccctgataaatgcttcaataatattgaaaaaggaagagtatgagtattcaacatttccgtgtcgcccttattcccttttttgcggcattttgccttcctgtttttgctcacccagaaacgctggtgaaagtaaaagatgctgaagatcagttgggtgcacgagtgggttacatcgaactggatctcaacagcggtaagatccttgagagttttcgccccgaagaacgttttccaatgatgagcacttttaaagttctgctatgtggcgcggtattatcccgtattgacgccgggcaagagcaactcggtcgccgcatacactattctcagaatgacttggttgagtactcaccagtcacagaaaagcatcttacggatggcatgacagtaagagaattatgcagtgctgccataaccatgagtgataacactgcggccaacttacttctgacaacgatcggaggaccgaaggagctaaccgcttttttgcacaacatgggggatcatgtaactcgccttgatcgttgggaaccggagctgaatgaagccataccaaacgacgagcgtgacaccacgatgcctgtagcaatggcaacaacgttgcgcaaactattaactggcgaactacttactctagcttcccggcaacaattaatagactggatggaggcggataaagttgcaggaccacttctgcgctcggcccttccggctggctggtttattgctgataaatctggagccggtgagcgtgggtctcgcggtatcattgcagcactggggccagatggtaagccctcccgtatcgtagttatctacacgacggggagtcaggcaactatggatgaacgaaatagacagatcgctgagataggtgcctcactgattaagcattggtaactgtcagaccaagtttactcatatatactttagattgatttaaaacttcatttttaatttaaaaggatctaggtgaagatcctttttgataatctcatgaccaaaatcccttaacgtgagttttcgttccactgagcgtcagaccccgtagaaaagatcaaaggatcttcttgagatcctttttttctgcgcgtaatctgctgcttgcaaacaaaaaaaccaccgctaccagcggtggtttgtttgccggatcaagagctaccaactctttttccgaaggtaactggcttcagcagagcgcagataccaaatactgtccttctagtgtagccgtagttaggccaccacttcaagaactctgtagcaccgcctacatacctcgctctgctaatcctgttaccagtggctgctgccagtggcgataagtcgtgtcttaccgggttggactcaagacgatagttaccggataaggcgcagcggtcgggctgaacggggggttcgtgcacacagcccagcttggagcgaacgacctacaccgaactgagatacctacagcgtgagctatgagaaagcgccacgcttcccgaagggagaaaggcggacaggtatccggtaagcggcagggtcggaacaggagagcgcacgagggagcttccagggggaaacgcctggtatctttatagtcctgtcgggtttcgccacctctgacttgagcgtcgatttttgtgatgctcgtcaggggggcggagcctatggaaaaacgccagcaacgcggcctttttacggttcctggccttttgctggccttttgctcacatgttctttcctgcgttatcccctgattctgtggataaccgtattaccgcctttgagtgagctgataccgctcgccgcagccgaacgaccgagcgcagcgagtcagtgagcgaggaagcggaagagcgcccaatacgcaaaccgcctctccccgcgcgttggccgattcattaatgcagctggcacgacaggtttcccgactggaaagcgggcagtgagcgcaacgcaattaatgtgagttagctcactcattaggcaccccaggctttacactttatgcttccggctcgtatgttgtgtggaattgtgagcggataacaatttcacacaggaaacagctatgaccatgattacgccaagcttgcatgcctgcagcccgggggatccgccctaagcttcgtacgctagcctaagtacgtactcaaaatgccaacaaataaaaaaaaagttgctttaataatgccaaaacaaattaataaaacacttacaacaccggattttttttaattaaaatgtgccatttaggataaatagttaatatttttaataattatttaaaaagccgtatctactaaaatgatttttatttggttgaaaatattaatatgtttaaatcaacacaatctatcaaaattaaactaaaaaaaaaataagtgtacgtggttaacattagtacagtaatataagaggaaaatgagaaattaagaaattgaaagcgagtctaatttttaaattatgaacctgcatatataaaaggaaagaaagaatccaggaagaaaagaaatgaaaccatgcatggtcccctcgtcatcacgagtttctgccatttgcaatagaaacactgaaacacctttctctttgtcacttaattgagatgccgaagccacctcacaccatgaacttcatgaggtgtagcacccaaggcttccatagccatgcatactgaagaatgtctcaagctcagcaccctacttctgtgacgtgtccctcattcaccttcctctcttccctataaataaccacgcctcaggttctccgcttcacaactcaaacattctctccattggtccttaaacactcatcagtcatcaccgcggccgcaaaccatggaggtccgacgacgaaagatagacgtgctcaaggcccagaaaaacggctacgaatcgggcccaccatctcgacaatcgtcgcagccctcctcaagagcatcgtccagaacccgcaacaaacactcctcgtccaccctgtcgctcagcggactgaccatgaaagtccagaagaaacctgcgggacccccggcgaactccaaaacgccattcctacacatcaagcccgtgcacacgtgctgctccacatcaatgctttcgcgcgattatgacggctccaaccccagcttcaagggcttcaaaaacatcggcatgatcattctcattgtgggaaatctacggctcgcattcgaaaactacctcaaatacggcatttccaacccgttcttcgaccccaaaattactccttccgagtggcagctctcaggcttgctcatagtcgtggcctacgcacatatcctcatggcctacgctattgagagcgctgccaagctgctgttcctctctagcaaacaccactacatggccgtggggcttctgcataccatgaacactttgtcgtccatctcgttgctgtcctacgtcgtctactactacctgcccaaccccgtggcaggcacaatagtcgagtttgtggccgttattctgtctctcaaactcgcctcatacgccctcactaactcggatctccgaaaagccgcaattcatgcccagaagctcgacaagacgcaagacgataacgaaaaggaatccacctcgtcttcctcttcttcagatgacgcagagactttggcagacattgacgtcattcctgcatactacgcacagctgccctacccccagaatgtgacgctgtcgaacctgctgtacttctggtttgctcccacactggtctaccagcccgtgtaccccaagacggagcgtattcgacccaagcacgtgatccgaaacctgtttgagctcgtctctctgtgcatgcttattcagtttctcatcttccagtacgcctaccccatcatgcagtcgtgtctggctctgttcttccagcccaagctcgattatgccaacatctccgagcgcctcatgaagttggcctccgtgtctatgatggtctggctcattggattctacgctttcttccagaacggtctcaatcttattgccgagctcacctgttttggaaacagaaccttctaccagcagtggtggaattcccgctccattggccagtactggactctatggaacaagccagtcaaccagtactttagacaccacgtctacgtgcctcttctcgctcggggcatgtcgcggttcaatgcgtcggtggtggttttctttttctccgccgtcatccatgaactgcttgtcggcatccccactcacaacatcatcggagccgccttcttcggcatgatgtcgcaggtgcctctgatcatggctactgagaaccttcagcatattaactcctctctgggccccttccttggcaactgtgcattctggttcacctttttcctgggacaacccacttgtgcattcctttactatttggcctacaactacaagcagaaccagtagc

SEQ ID NO: 75 - DNA, 11693 bp, Artificial Sequence
  plasmid pKR1236
gtacgagatccggccggccagatcctgcaggagatccaagcttttgatccatgcccttcatttgccgcttattaattaatttggtaacagtccgtactaatcagttacttatccttcccccatcataattaatcttggtagtctcgaatgccacaacactgactagtctcttggatcataagaaaaagccaaggaacaaaagaagacaaaacacaatgagagtatcctttgcatagcaatgtctaagttcataaaattcaaacaaaaacgcaatcacacacagtggacatcacttatccactagctgatcaggatcgccgcgtcaagaaaaaaaaactggaccccaaaagccatgcacaacaacacgtactcacaaaggtgtcaatcgagcagcccaaaacattcaccaactcaacccatcatgagccctcacatttgttgtttctaacccaacctcaaactcgtattctcttccgccacctcatttttgtttatttcaacacccgtcaaactgcatgccaccccgtggccaaatgtccatgcatgttaacaagacctatgactataaatagctgcaatctcggcccaggttttcatcatcaagaaccagttcaatatcctagtacaccgtattaaagaatttaagatatactgcggccgcatgactatcgactcacaatactacaagtcgcgagacaaaaacgacacggcacccaaaatcgcgggaatccgatatgccccgctatcgacaccattactcaaccgatgtgagaccttctctctggtctggcacattttcagcattcccactttcctcacaattttcatgctatgctgcgcaattccactgctctggccatttgtgattgcgtatgtagtgtacgctgttaaagacgactccccgtccaacggaggagtggtcaagcgatactcgcctatttcaagaaacttcttcatctggaagctctttggccgctacttccccataactctgcacaagacggtggatctggagcccacgcacacatactaccctctggacgtccaggagtatcacctgattgctgagagatactggccgcagaacaagtacctccgagcaatcatcaccaccatcgagtactttctgcccgccttcatgaaacggtctctttctatcaacgagcaggagcagcctgccgagcgagatcctctcctgtctcccgtttctcccagctctccgggttctcaacctgacaagtggattaaccacgacagcagatatagccgtggagaatcatctggctccaacggccacgcctcgggctccgaacttaacggcaacggcaacaacggcaccactaaccgacgacctttgtcgtccgcctctgctggctccactgcatctgattccacgcttcttaacgggtccctcaactcctacgccaaccagatcattggcgaaaacgacccacagctgtcgcccacaaaactcaagcccactggcagaaaatacatcttcggctaccacccccacggcattatcggcatgggagcctttggtggaattgccaccgagggagctggatggtccaagctctttccgggcatccctgtttctcttatgactctcaccaacaacttccgagtgcctctctacagagagtacctcatgagtctgggagtcgcttctgtctccaagaagtcctgcaaggccctcctcaagcgaaaccagtctatctgcattgtcgttggtggagcacaggaaagtcttctggccagacccggtgtcatggacctggtgctactcaagcgaaagggttttgttcgacttggtatggaggtcggaaatgtcgcccttgttcccatcatggcctttggtgagaacgacctctatgaccaggttagcaacgacaagtcgtccaagctgtaccgattccagcagtttgtcaagaacttccttggattcacccttcctttgatgcatgcccgaggcgtcttcaactacgatgtcggtcttgtcccctacaggcgacccgtcaacattgtggttggttcccccattgacttgccttatctcccacaccccaccgacgaagaagtgtccgaataccacgaccgatacatcgccgagctgcagcgaatctacaacgagcacaaggatgaatatttcatcgattggaccgaggagggcaaaggagccccagagttccgaatgattgagtaagcggccgcaagtatgaactaaaatgcatgtaggtgtaagagctcatggagagcatggaatattgtatccgaccatgtaacagtataataactgagctccatctcacttcttctatgaataaacaaaggatgttatgatatattaacactctatctatgcaccttattgttctatgataaatttcctcttattattataaatcatctgaatcgtgacggcttatggaatgcttcaaatagtacaaaaacaaatgtgtactataagactttctaaacaattctaaccttagcattgtgaacgagacataagtgttaagaagacataacaattataatggaagaagtttgtctccatttatatattatatattacccacttatgtattatattaggatgttaaggagacataacaattataaagagagaagtttgtatccatttatatattatatactacccatttatatattatacttatccacttatttaatgtctttataaggtttgatccatgatatttctaatattttagttgatatgtatatgaaagggtactatttgaactctcttactctgtataaaggttggatcatccttaaagtgggtctatttaattttattgcttcttacagataaaaaaaaaattatgagttggtttgataaaatattgaaggatttaaaataataataaataacatataatatatgtatataaatttattataatataacatttatctataaaaaagtaaatattgtcataaatctatacaatcgtttagccttgctggacgaatctcaattatttaaacgagagtaaacatatttgactttttggttatttaacaaattattatttaacactatatgaaatttttttttttatcagcaaagaataaaattaaattaagaaggacaatggtgtcccaatccttatacaaccaacttccacaagaaagtcaagtcagagacaacaaaaaaacaagcaaaggaaattttttaatttgagttgtcttgtttgctgcataatttatgcagtaaaacactacacataacccttttagcagtagagcaatggttgaccgtgtgcttagcttcttttattttatttttttatcagcaaagaataaataaaataaaatgagacacttcagggatgtttcaacaagcttggcgcgccgttctatagtgtcacctaaatcgtatgtgtatgatacataaggttatgtattaattgtagccgcgttctaacgacaatatgtccatatggtgcactctcagtacaatctgctctgatgccgcatagttaagccagccccgacacccgccaacacccgctgacgcgccctgacgggcttgtctgctcccggcatccgcttacagacaagctgtgaccgtctccgggagctgcatgtgtcagaggttttcaccgtcatcaccgaaacgcgcgagacgaaagggcctcgtgatacgcctatttttataggttaatgtcatgaccaaaatcccttaacgtgagttttcgttccactgagcgtcagaccccgtagaaaagatcaaaggatcttcttgagatcctttttttctgcgcgtaatctgctgcttgcaaacaaaaaaaccaccgctaccagcggtggtttgtttgccggatcaagagctaccaactctttttccgaaggtaactggcttcagcagagcgcagataccaaatactgtccttctagtgtagccgtagttaggccaccacttcaagaactctgtagcaccgcctacatacctcgctctgctaatcctgttaccagtggctgctgccagtggcgataagtcgtgtcttaccgggttggactcaagacgatagttaccggataaggcgcagcggtcgggctgaacggggggttcgtgcacacagcccagcttggagcgaacgacctacaccgaactgagatacctacagcgtgagcattgagaaagcgccacgcttcccgaagggagaaaggcggacaggtatccggtaagcggcagggtcggaacaggagagcgcacgagggagcttccagggggaaacgcctggtatctttatagtcctgtcgggtttcgccacctctgacttgagcgtcgatttttgtgatgctcgtcaggggggcggagcctatggaaaaacgccagcaacgcggcctttttacggttcctggccttttgctggccttttgctcacatgttctttcctgcgttatcccctgattctgtggataaccgtattaccgcctttgagtgagctgataccgctcgccgcagccgaacgaccgagcgcagcgagtcagtgagcgaggaagcggaagagcgcccaatacgcaaaccgcctctccccgcgcgttggccgattcattaatgcaggttgatcgattcgacatcgatctagtaacatagatgacaccgcgcgcgataatttatcctagtttgcgcgctatattttgttttctatcgcgtattaaatgtataattgcgggactctaatcataaaaacccatctcataaataacgtcatgcattacatgttaattattacatgcttaacgtaattcaacagaaattatatgataatcatcgcaagaccggcaacaggattcaatcttaagaaactttattgccaaatgtttgaacgatctgcttcgacgcactccttctttaggtacctcactattcctttgccctcggacgagtgctggggcgtcggtttccactatcggcgagtacttctacacagccatcggtccagacggccgcgcttctgcgggcgatttgtgtacgcccgacagtcccggctccggatcggacgattgcgtcgcatcgaccctgcgcccaagctgcatcatcgaaattgccgtcaaccaagctctgatagagttggtcaagaccaatgcggagcatatacgcccggagccgcggcgatcctgcaagctccggatgcctccgctcgaagtagcgcgtctgctgctccatacaagccaaccacggcctccagaagaagatgttggcgacctcgtattgggaatccccgaacatcgcctcgctccagtcaatgaccgctgttatgcggccattgtccgtcaggacattgttggagccgaaatccgcgtgcacgaggtgccggacttcggggcagtcctcggcccaaagcatcagctcatcgagagcctgcgcgacggacgcactgacggtgtcgtccatcacagtttgccagtgatacacatggggatcagcaatcgcgcatatgaaatcacgccatgtagtgtattgaccgattccttgcggtccgaatgggccgaacccgctcgtctggctaagatcggccgcagcgatcgcatccatggcctccgcgaccggctgcagaacagcgggcagttcggtttcaggcaggtcttgcaacgtgacaccctgtgcacggcgggagatgcaataggtcaggctctcgctgaattccccaatgtcaagcacttccggaatcgggagcgcggccgatgcaaagtgccgataaacataacgatctttgtagaaaccatcggcgcagctatttacccgcaggacatatccacgccctcctacatcgaagctgaaagcacgagattcttcgccctccgagagctgcatcaggtcggagacgctgtcgaacttttcgatcagaaacttctcgacagacgtcgcggtgagttcaggctttttcatggtttaataagaagagaaaagagttcttttgttatggctgaagtaatagagaaatgagctcgagcgtgtcctctccaaatgaaatgaacttccttatatagaggaagggtcttgcgaaggatagtgggattgtgcgtcatcccttacgtcagtggagatgtcacatcaatccacttgctttgaagacgtggttggaacgtcttctttttccacgatgctcctcgtgggtgggggtccatctttgggaccactgtcggcagaggcatcttgaatgatagcctttcctttatcgcaatgatggcatttgtaggagccaccttccttttctactgtcctttcgatgaagtgacagatagctgggcaatggaatccgaggaggtttcccgaaattatcctttgttgaaaagtctcaatagccctttggtcttctgagactgtatctttgacatttttggagtagaccagagtgtcgtgctccaccatgttgacgaagattttcttcttgtcattgagtcgtaaaagactctgtatgaactgttcgccagtcttcacggcgagttctgttagatcctcgatttgaatcttagactccatgcatggccttagattcagtaggaactacctttttagagactccaatctctattacttgccttggtttatgaagcaagccttgaatcgtccatactggaatagtacttctgatcttgagaaatatgtctttctctgtgttcttgatgcaattagtcctgaatcttttgactgcatctttaaccttcttgggaaggtatttgatctcctggagattgttactcgggtagatcgtcttgatgagacctgctgcgtaggcctctctaaccatctgtgggtcagcattctttctgaaattgaagaggctaaccttctcattatcagtggtgaacatagtgtcgtcaccttcaccttcgaacttccttcctagatcgtaaagatagaggaaatcgtccattgtaatctccggggcaaaggagatctcttttggggctggatcactgctgggccttttggttcctagcgtgagccagtgggctttttgctttggtgggcttgttagggccttagcaaagctcttgggcttgagttgagcttctcctttggggatgaagttcaacctgtctgtttgctgacttgttgtgtacgcgtcagctgctgctcttgcctctgtaatagtggcaaatttcttgtgtgcaactccgggaacgccgtttgttgccgcctttgtacaaccccagtcatcgtatataccggcatgtggaccgttatacacaacgtagtagttgatatgagggtgttgaatacccgattctgctctgagaggagcaactgtgctgttaagctcagatttttgtgggattggaattggatcgatctcgatcccgcgaaattaatacgactcactatagggagaccacaacggtttccctctagaaataattttgtttaactttaagaaggagatatacccatggaaaagcctgaactcaccgcgacgtctgtcgagaagtttctgatcgaaaagttcgacagcgtctccgacctgatgcagctctcggagggcgaagaatctcgtgctttcagcttcgatgtaggagggcgtggatatgtcctgcgggtaaatagctgcgccgatggtttctacaaagatcgttatgtttatcggcactttgcatcggccgcgctcccgattccggaagtgcttgacattggggaattcagcgagagcctgacctattgcatctcccgccgtgcacagggtgtcacgttgcaagacctgcctgaaaccgaactgcccgctgttctgcagccggtcgcggaggctatggatgcgatcgctgcggccgatcttagccagacgagcgggttcggcccattcggaccgcaaggaatcggtcaatacactacatggcgtgatttcatatgcgcgattgctgatccccatgtgtatcactggcaaactgtgatggacgacaccgtcagtgcgtccgtcgcgcaggctctcgatgagctgatgctttgggccgaggactgccccgaagtccggcacctcgtgcacgcggatttcggctccaacaatgtcctgacggacaatggccgcataacagcggtcattgactggagcgaggcgatgttcggggattcccaatacgaggtcgccaacatcttcttctggaggccgtggttggcttgtatggagcagcagacgcgctacttcgagcggaggcatccggagcttgcaggatcgccgcggctccgggcgtatatgctccgcattggtcttgaccaactctatcagagcttggttgacggcaatttcgatgatgcagcttgggcgcagggtcgatgcgacgcaatcgtccgatccggagccgggactgtcgggcgtacacaaatcgcccgcagaagcgcggccgtctggaccgatggctgtgtagaagtactcgccgatagtggaaaccgacgccccagcactcgtccgagggcaaaggaatagtgaggtacagcttggatcgatccggctgctaacaaagcccgaaaggaagctgagttggctgctgccaccgctgagcaataactagcataaccccttggggcctctaaacgggtcttgaggggttttttgctgaaaggaggaactatatccggatgatcgggcgcgccgtcgacggatccgtacgtgaaggttaaacatggtgaatatgttaccactagctgggatgcccattagatcaaaactgtaaaattctcccgtttcccttctattcacatgtgagccccctcccttttctttctttctcaattttgattgagttaaagtcaccagcaatgcatcactcaccctccaaaaaatttcttgtacaacttctcggactatcccaaagctccttttcctgagatggatggtcctgtctcttgcccttgatgtcttccttgttcgattttggcttcctctaatgtctttcttgctaggaatcaccacctcactcatctatgttgtcgtagcttctgaaagtctcatacatatccttagtgttgcactcatcttgtattgaagtgaaaaagaatgttgttctcctatccaaatctccattgaatctctttctcccaatgttgtcccatcggttggtcctcctctccaaccaattgtaaggtgtttaacataaacatggtacaattaagatttttcatttcattaagaaaagattgagatttgtggttctaaagtttcaattagagtttgatgatattgaaacaaccgtagaacacattaagtattactaacttatacatagagcattggaatttcaccttttatttattctgtttccgccaaaggtacatgactcaagttattttacacaagtaacaaaggcatctaagcctaagtattcttattcagacttttcattattactttcattgatttggtgcgaaatgcggccgctactggttctgcttgtagttgtaggccaaatagtaaaggaatgcacaagtgggttgtcccaggaaaaaggtgaaccagaatgcacagttgccaaggaaggggcccagagaggagttaatatgctgaaggttctcagtagccatgatcagaggcacctgcgacatcatgccgaagaaggcggctccgatgatgttgtgagtggggatgccgacaagcagttcatggatgacggcggagaaaaagaaaaccaccaccgacgcattgaaccgcgacatgccccgagcgagaagaggcacgtagacgtggtgtctaaagtactggttgactggcttgttccatagagtccagtactggccaatggagcgggaattccaccactgctggtagaaggttctgtttccaaaacaggtgagctcggcaataagattgagaccgttctggaagaaagcgtagaatccaatgagccagaccatcatagacacggaggccaacttcatgaggcgctcggagatgttggcataatcgagcttgggctggaagaacagagccagacacgactgcatgatggggtaggcgtactggaagatgagaaactgaataagcatgcacagagagacgagctcaaacaggtttcggatcacgtgcttgggtcgaatacgctccgtcttggggtacacgggctggtagaccagtgtgggagcaaaccagaagtacagcaggttcgacagcgtcacattctgggggtagggcagctgtgcgtagtatgcaggaatgacgtcaatgtctgccaaagtctctgcgtcatctgaagaagaggaagacgaggtggattccttttcgttatcgtcttgcgtcttgtcgagcttctgggcatgaattgcggcttttcggagatccgagttagtgagggcgtatgaggcgagtttgagagacagaataacggccacaaactcgactattgtgcctgccacggggttgggcaggtagtagtagacgacgtaggacagcaacgagatggacgacaaagtgttcatggtatgcagaagccccacggccatgtagtggtgtttgctagagaggaacagcagcttggcagcgctctcaatagcgtaggccatgaggatatgtgcgtaggccacgactatgagcaagcctgagagctgccactcggaaggagtaattttggggtcgaagaacgggttggaaatgccgtatttgaggtagttttcgaatgcgagccgtagatttcccacaatgagaatgatcatgccgatgtttttgaagcccttgaagctggggttggagccgtcataatcgcgcgaaagcattgatgtggagcagcacgtgtgcacgggcttgatgtgtaggaatggcgttttggagttcgccgggggtcccgcaggtttcttctggactttcatggtcagtccgctgagcgacagggtggacgaggagtgtttgttgcgggttctggacgatgctcttgaggagggctgcgacgattgtcgagatggtgggcccgattcgtagccgtttttctgggccttgagcacgtctatctttcgtcgtcggacctccatggtttgcggccgcggtgatgactgatgagtgtttaaggaccaatggagagaatgtttgagttgtgaagcggagaacctgaggcgtggttatttatagggaagagaggaaggtgaatgagggacacgtcacagaagtagggtgctgagcttgagacattcttcagtatgcatggctatggaagccttgggtgctacacctcatgaagttcatggtgtgaggtggcttcggcatctcaattaagtgacaaagagaaaggtgtttcagtgtttctattgcaaatggcagaaactcgtgatgacgaggggaccatgcatggtttcatttcttttcttcctggattctttctttccttttatatatgcaggttcataatttaaaaattagactcgctttcaatttcttaatttctcattttcctcttatattactgtactaatgttaaccacgtacacttattttttttttagtttaattttgatagattgtgttgatttaaacatattaatattttcaaccaaataaaaatcattttagtagatacggctttttaaataattattaaaaatattaactatttatcctaaatggcacattttaattaaaaaaaatccggtgttgtaagtgttttattaatttgttttggcattattaaagcaactttttttttatttgttggcattttgagtacgtacttaggctagc

SEQ ID NO: 76 - DNA, 34 bp, Artificial Sequence
  primer oYDG2-1
agcggccgcaacatgactatcgactcacaatact

SEQ ID NO: 77 - DNA, 25 bp, Artificial Sequence
  primer oYDG2-2
tgcggccgcttactcaatcattcgg

SEQ ID NO: 78 - DNA, 5079 bp, Artificial Sequence
  plasmid pKR1254
aattccagcacactggcggccgttactagtggatccgagctcggtaccaagcttgatgcatagcttgagtattctaacgcgtcacctaaatagcttggcgtaatcatggtcatagctgtttcctgtgtgaaattgttatccgctcacaattccacacaacatacgagccggaagcataaagtgtaaagcctggggtgcctaatgagtgagctaactcacattaattgcgttgcgctcactgcccgctttccagtcgggaaacctgtcgtgccagctgcattaatgaatcggccaacgcgcggggagaggcggtttgcgtattgggcgctcttccgcttcctcgctcactgactcgctgcgctcggtcgttcggctgcggcgagcggtatcagctcactcaaaggcggtaatacggttatccacagaatcaggggataacgcaggaaagaacatgtgagcaaaaggccagcaaaagcccaggaaccgtaaaaaggccgcgttgctggcgtttttccataggctccgcccccctgacgagcatcacaaaaatcgacgctcaagtcagaggtggcgaaacccgacaggactataaagataccaggcgtttccccctggaagctccctcgtgcgctctcctgttccgaccctgccgcttaccggatacctgtccgcctttctcccttcgggaagcgtggcgctttctcatagctcacgctgtaggtatctcagttcggtgtaggtcgttcgctccaagctgggctgtgtgcacgaaccccccgttcagcccgaccgctgcgccttatccggtaactatcgtcttgagtccaacccggtaagacacgacttatcgccactggcagcagccactggtaacaggattagcagagcgaggtatgtaggcggtgctacagagttcttgaagtggtggcctaactacggctacactagaaggacagtatttggtatctgcgctctgctgaagccagttaccttcggaaaaagagttggtagctcttgatccggcaaacaaaccaccgctggtagcggtggtttttttgtttgcaagcagcagattacgcgcagaaaaaaaggatctcaagaagatcctttgatcttttctacggggtctgacgctcagtggaacgaaaactcacgttaagggattttggtcatgagattatcaaaaaggatcttcacctagatccttttaaattaaaaatgaagttttagcacgtgtcagtcctgctcctcggccacgaagtgcacgcagttgccggccgggtcgcgcagggcgaactcccgcccccacggctgctcgccgatctcggtcatggccggcccggaggcgtcccggaagttcgtggacacgacctccgaccactcggcgtacagctcgtccaggccgcgcacccacacccaggccagggtgttgtccggcaccacctggtcctggaccgcgctgatgaacagggtcacgtcgtcccggaccacaccggcgaagtcgtcctccacgaagtcccgggagaacccgagccggtcggtccagaactcgaccgctccggcgacgtcgcgcgcggtgagcaccggaacggcactggtcaacttggccatggtggccctcctcacgtgctattattgaagcatttatcagggttattgtctcatgagcggatacatatttgaatgtatttagaaaaataaacaaataggggttccgcgcacatttccccgaaaagtgccacctgtatgcggtgtgaaataccgcacagatgcgtaaggagaaaataccgcatcaggaaattgtaagcgttaataattcagaagaactcgtcaagaaggcgatagaaggcgatgcgctgcgaatcgggagcggcgataccgtaaagcacgaggaagcggtcagcccattcgccgccaagctcttcagcaatatcacgggtagccaacgctatgtcctgatagcggtccgccacacccagccggccacagtcgatgaatccagaaaagcggccattttccaccatgatattcggcaagcaggcatcgccatgggtcacgacgagatcctcgccgtcgggcatgctcgccttgagcctggcgaacagttcggctggcgcgagcccctgatgctcttcgtccagatcatcctgatcgacaagaccggcttccatccgagtacgtgctcgctcgatgcgatgtttcgcttggtggtcgaatgggcaggtagccggatcaagcgtatgcagccgccgcattgcatcagccatgatggatactttctcggcaggagcaaggtgagatgacaggagatcctgccccggcacttcgcccaatagcagccagtcccttcccgcttcagtgacaacgtcgagcacagctgcgcaaggaacgcccgtcgtggccagccacgatagccgcgctgcctcgtcttgcagttcattcagggcaccggacaggtcggtcttgacaaaaagaaccgggcgcccctgcgctgacagccggaacacggcggcatcagagcagccgattgtctgttgtgcccagtcatagccgaatagcctctccacccaagcggccggagaacctgcgtgcaatccatcttgttcaatcatgcgaaacgatcctcatcctgtctcttgatcagagcttgatcccctgcgccatcagatccttggcggcgagaaagccatccagtttactttgcagggcttcccaaccttaccagagggcgccccagctggcaattccggttcgcttgctgtccataaaaccgcccagtctagctatcgccatgtaagcccactgcaagctacctgctttctctttgcgcttgcgttttcccttgtccagatagcccagtagctgacattcatccggggtcagcaccgtttctgcggactggctttctacgtgaaaaggatctaggtgaagatcctttttgataatctcatgcctgacatttatattccccagaacatcaggttaatggcgtttttgatgtcattttcgcggtggctgagatcagccacttcttccccgataacggagaccggcacactggccatatcggtggtcatcatgcgccagctttcatccccgatatgcaccaccgggtaaagttcacgggagactttatctgacagcagacgtgcactggccagggggatcaccatccgtcgccccggcgtgtcaataatatcactctgtacatccacaaacagacgataacggctctctcttttataggtgtaaaccttaaactgccgtacgtataggctgcgcaactgttgggaagggcgatcggtgcgggcctcttcgctattacgccagctggcgaaagggggatgtgctgcaaggcgattaagttgggtaacgccagggttttcccagtcacgacgttgtaaaacgacggccagtgaattgtaatacgactcactatagggcgaattgggccctctagatgcatgctcgagcggccgccagtgtgatggatatctgcagaattcaggagcggccgcaacatgactatcgactcacaatactacaagtcgcgagacaaaaacgacacggcacccaaaatcgcgggaatccgatatgccccgctatcgacaccattactcaaccgatgtgagaccttctctctggtctggcacattttcagcattcccactttcctcacaattttcatgctatgctgcgcaattccactgctctggccatttgtgattgcgtatgtagtgtacgctgttaaagacgactccccgtccaacggaggagtggtcaagcgatactcgcctatttcaagaaacttcttcatctggaagctctttggccgctacttccccataactctgcacaagacggtggatctggagcccacgcacacatactaccctctggacgtccaggagtatcacctgattgctgagagatactggccgcagaacaagtacctccgagcaatcatcaccaccatcgagtactttctgcccgccttcatgaaacggtctctttctatcaacgagcaggagcagcctgccgagcgagatcctctcctgtctcccgtttctcccagctctccgggttctcaacctgacaagtggattaaccacgacagcagatatagccgtggagaatcatctggctccaacggccacgcctcgggctccgaacttaacggcaacggcaacaacggcaccactaaccgacgacctttgtcgtccgcctctgctggctccactgcatctgattccacgcttcttaacgggtccctcaactcctacgccaaccagatcattggcgaaaacgacccacagctgtcgcccacaaaactcaagcccactggcagaaaatacatcttcggctaccacccccacggcattatcggcatgggagcctttggtggaattgccaccgagggagctggatggtccaagctctttccgggcatccctgtttctcttatgactctcaccaacaacttccgagtgcctctctacagagagtacctcatgagtctgggagtcgcttctgtctccaagaagtcctgcaaggccctcctcaagcgaaaccagtctatctgcattgtcgttggtggagcacaggaaagtcttctggccagacccggtgtcatggacctggtgctactcaagcgaaagggttttgttcgacttggtatggaggtcggaaatgtcgcccttgttcccatcatggcctttggtgagaacgacctctatgaccaggttagcaacgacaagtcgtccaagctgtaccgattccagcagtttgtcaagaacttccttggattcacccttcctttgatgcatgcccgaggcgtcttcaactacgatgtcggtcttgtcccctacaggcgacccgtcaacattgtggttggttcccccattgacttgccttatctcccacaccccaccgacgaagaagtgtccgaataccacgaccgatacatcgccgagctgcagcgaatctacaacgagcacaaggatgaatatttcatcgattggaccgaggagggcaaaggagccccagagttccgaatgattgagtaagcggccgcacctg

SEQ ID NO: 79 - DNA, 34 bp, Artificial Sequence
  primer YlD2_Y326F-5
cttccgagtgcctctcttcagagagtacctcatg

SEQ ID NO: 80 - DNA, 34 bp, Artificial Sequence
  primer YlD2_Y326F-3
catgaggtactctctgaagagaggcactcggaag

SEQ ID NO: 81 - DNA, 5079 bp, Artificial Sequence
  plasmid pKR1254_Y326F
aattccagcacactggcggccgttactagtggatccgagctcggtaccaagcttgatgcatagcttgagtattctaacgcgtcacctaaatagcttggcgtaatcatggtcatagctgtttcctgtgtgaaattgttatccgctcacaattccacacaacatacgagccggaagcataaagtgtaaagcctggggtgcctaatgagtgagctaactcacattaattgcgttgcgctcactgcccgctttccagtcgggaaacctgtcgtgccagctgcattaatgaatcggccaacgcgcggggagaggcggtttgcgtattgggcgctcttccgcttcctcgctcactgactcgctgcgctcggtcgttcggctgcggcgagcggtatcagctcactcaaaggcggtaatacggttatccacagaatcaggggataacgcaggaaagaacatgtgagcaaaaggccagcaaaagcccaggaaccgtaaaaaggccgcgttgctggcgtttttccataggctccgcccccctgacgagcatcacaaaaatcgacgctcaagtcagaggtggcgaaacccgacaggactataaagataccaggcgtttccccctggaagctccctcgtgcgctctcctgttccgaccctgccgcttaccggatacctgtccgcctttctcccttcgggaagcgtggcgctttctcatagctcacgctgtaggtatctcagttcggtgtaggtcgttcgctccaagctgggctgtgtgcacgaaccccccgttcagcccgaccgctgcgccttatccggtaactatcgtcttgagtccaacccggtaagacacgacttatcgccactggcagcagccactggtaacaggattagcagagcgaggtatgtaggcggtgctacagagttcttgaagtggtggcctaactacggctacactagaaggacagtatttggtatctgcgctctgctgaagccagttaccttcggaaaaagagttggtagctcttgatccggcaaacaaaccaccgctggtagcggtggtttttttgtttgcaagcagcagattacgcgcagaaaaaaaggatctcaagaagatcctttgatcttttctacggggtctgacgctcagtggaacgaaaactcacgttaagggattttggtcatgagattatcaaaaaggatcttcacctagatccttttaaattaaaaatgaagttttagcacgtgtcagtcctgctcctcggccacgaagtgcacgcagttgccggccgggtcgcgcagggcgaactcccgcccccacggctgctcgccgatctcggtcatggccggcccggaggcgtcccggaagttcgtggacacgacctccgaccactcggcgtacagctcgtccaggccgcgcacccacacccaggccagggtgttgtccggcaccacctggtcctggaccgcgctgatgaacagggtcacgtcgtcccggaccacaccggcgaagtcgtcctccacgaagtcccgggagaacccgagccggtcggtccagaactcgaccgctccggcgacgtcgcgcgcggtgagcaccggaacggcactggtcaacttggccatggtggccctcctcacgtgctattattgaagcatttatcagggttattgtctcatgagcggatacatatttgaatgtatttagaaaaataaacaaataggggttccgcgcacatttccccgaaaagtgccacctgtatgcggtgtgaaataccgcacagatgcgtaaggagaaaataccgcatcaggaaattgtaagcgttaataattcagaagaactcgtcaagaaggcgatagaaggcgatgcgctgcgaatcgggagcggcgataccgtaaagcacgaggaagcggtcagcccattcgccgccaagctcttcagcaatatcacgggtagccaacgctatgtcctgatagcggtccgccacacccagccggccacagtcgatgaatccagaaaagcggccattttccaccatgatattcggcaagcaggcatcgccatgggtcacgacgagatcctcgccgtcgggcatgctcgccttgagcctggcgaacagttcggctggcgcgagcccctgatgctcttcgtccagatcatcctgatcgacaagaccggcttccatccgagtacgtgctcgctcgatgcgatgtttcgcttggtggtcgaatgggcaggtagccggatcaagcgtatgcagccgccgcattgcatcagccatgatggatactttctcggcaggagcaaggtgagatgacaggagatcctgccccggcacttcgcccaatagcagccagtcccttcccgcttcagtgacaacgtcgagcacagctgcgcaaggaacgcccgtcgtggccagccacgatagccgcgctgcctcgtcttgcagttcattcagggcaccggacaggtcggtcttgacaaaaagaaccgggcgcccctgcgctgacagccggaacacggcggcatcagagcagccgattgtctgttgtgcccagtcatagccgaatagcctctccacccaagcggccggagaacctgcgtgcaatccatcttgttcaatcatgcgaaacgatcctcatcctgtctcttgatcagagcttgatcccctgcgccatcagatccttggcggcgagaaagccatccagtttactttgcagggcttcccaaccttaccagagggcgccccagctggcaattccggttcgcttgctgtccataaaaccgcccagtctagctatcgccatgtaagcccactgcaagctacctgctttctctttgcgcttgcgttttcccttgtccagatagcccagtagctgacattcatccggggtcagcaccgtttctgcggactggctttctacgtgaaaaggatctaggtgaagatcctttttgataatctcatgcctgacatttatattccccagaacatcaggttaatggcgtttttgatgtcattttcgcggtggctgagatcagccacttcttccccgataacggagaccggcacactggccatatcggtggtcatcatgcgccagctttcatccccgatatgcaccaccgggtaaagttcacgggagactttatctgacagcagacgtgcactggccagggggatcaccatccgtcgccccggcgtgtcaataatatcactctgtacatccacaaacagacgataacggctctctcttttataggtgtaaaccttaaactgccgtacgtataggctgcgcaactgttgggaagggcgatcggtgcgggcctcttcgctattacgccagctggcgaaagggggatgtgctgcaaggcgattaagttgggtaacgccagggttttcccagtcacgacgttgtaaaacgacggccagtgaattgtaatacgactcactatagggcgaattgggccctctagatgcatgctcgagcggccgccagtgtgatggatatctgcagaattcaggagcggccgcaacatgactatcgactcacaatactacaagtcgcgagacaaaaacgacacggcacccaaaatcgcgggaatccgatatgccccgctatcgacaccattactcaaccgatgtgagaccttctctctggtctggcacattttcagcattcccactttcctcacaattttcatgctatgctgcgcaattccactgctctggccatttgtgattgcgtatgtagtgtacgctgttaaagacgactccccgtccaacggaggagtggtcaagcgatactcgcctatttcaagaaacttcttcatctggaagctctttggccgctacttccccataactctgcacaagacggtggatctggagcccacgcacacatactaccctctggacgtccaggagtatcacctgattgctgagagatactggccgcagaacaagtacctccgagcaatcatcaccaccatcgagtactttctgcccgccttcatgaaacggtctctttctatcaacgagcaggagcagcctgccgagcgagatcctctcctgtctcccgtttctcccagctctccgggttctcaacctgacaagtggattaaccacgacagcagatatagccgtggagaatcatctggctccaacggccacgcctcgggctccgaacttaacggcaacggcaacaacggcaccactaaccgacgacctttgtcgtccgcctctgctggctccactgcatctgattccacgcttcttaacgggtccctcaactcctacgccaaccagatcattggcgaaaacgacccacagctgtcgcccacaaaactcaagcccactggcagaaaatacatcttcggctaccacccccacggcattatcggcatgggagcctttggtggaattgccaccgagggagctggatggtccaagctctttccgggcatccctgtttctcttatgactctcaccaacaacttccgagtgcctctcttcagagagtacctcatgagtctgggagtcgcttctgtctccaagaagtcctgcaaggccctcctcaagcgaaaccagtctatctgcattgtcgttggtggagcacaggaaagtcttctggccagacccggtgtcatggacctggtgctactcaagcgaaagggttttgttcgacttggtatggaggtcggaaatgtcgcccttgttcccatcatggcctttggtgagaacgacctctatgaccaggttagcaacgacaagtcgtccaagctgtaccgattccagcagtttgtcaagaacttccttggattcacccttcctttgatgcatgcccgaggcgtcttcaactacgatgtcggtcttgtcccctacaggcgacccgtcaacattgtggttggttcccccattgacttgccttatctcccacaccccaccgacgaagaagtgtccgaataccacgaccgatacatcgccgagctgcagcgaatctacaacgagcacaaggatgaatatttcatcgattggaccgaggagggcaaaggagccccagagttccgaatgattgagtaagcggccgcacctg

SEQ ID NO: 82 - DNA, 1545 bp, Yarrowia lipolytica
atgactatcgactcacaatactacaagtcgcgagacaaaaacgacacggcacccaaaatcgcgggaatccgatatgccccgctatcgacaccattactcaaccgatgtgagaccttctctctggtctggcacattttcagcattcccactttcctcacaattttcatgctatgctgcgcaattccactgctctggccatttgtgattgcgtatgtagtgtacgctgttaaagacgactccccgtccaacggaggagtggtcaagcgatactcgcctatttcaagaaacttcttcatctggaagctctttggccgctacttccccataactctgcacaagacggtggatctggagcccacgcacacatactaccctctggacgtccaggagtatcacctgattgctgagagatactggccgcagaacaagtacctccgagcaatcatcaccaccatcgagtactttctgcccgccttcatgaaacggtctctttctatcaacgagcaggagcagcctgccgagcgagatcctctcctgtctcccgtttctcccagctctccgggttctcaacctgacaagtggattaaccacgacagcagatatagccgtggagaatcatctggctccaacggccacgcctcgggctccgaacttaacggcaacggcaacaacggcaccactaaccgacgacctttgtcgtccgcctctgctggctccactgcatctgattccacgcttcttaacgggtccctcaactcctacgccaaccagatcattggcgaaaacgacccacagctgtcgcccacaaaactcaagcccactggcagaaaatacatcttcggctaccacccccacggcattatcggcatgggagcctttggtggaattgccaccgagggagctggatggtccaagctctttccgggcatccctgtttctcttatgactctcaccaacaacttccgagtgcctctcttcagagagtacctcatgagtctgggagtcgcttctgtctccaagaagtcctgcaaggccctcctcaagcgaaaccagtctatctgcattgtcgttggtggagcacaggaaagtcttctggccagacccggtgtcatggacctggtgctactcaagcgaaagggttttgttcgacttggtatggaggtcggaaatgtcgcccttgttcccatcatggcctttggtgagaacgacctctatgaccaggttagcaacgacaagtcgtccaagctgtaccgattccagcagtttgtcaagaacttccttggattcacccttcctttgatgcatgcccgaggcgtcttcaactacgatgtcggtcttgtcccctacaggcgacccgtcaacattgtggttggttcccccattgacttgccttatctcccacaccccaccgacgaagaagtgtccgaataccacgaccgatacatcgccgagctgcagcgaatctacaacgagcacaaggatgaatatttcatcgattggaccgaggagggcaaaggagccccagagttccgaatgattgagtaa

SEQ ID NO: 83 - protein, 514 aa, Yarrowia lipolytica
MTIDSQYYKSRDKNDTAPKIAGIRYAPLSTPLLNRCETFSLVWHIFSIPTFLTIFMLCCAIPLLWPFVIAYVVYAVKDDSPSNGGVVKRYSPISRNFFIWKLFGRYFPITLHKTVDLEPTHTYYPLDVQEYHLIAERYWPQNKYLRAIITTIEYFLPAFMKRSLSINEQEQPAERDPLLSPVSPSSPGSQPDKWINHDSRYSRGESSGSNGHASGSELNGNGNNGTTNRRPLSSASAGSTASDSTLLNGSLNSYANQIIGENDPQLSPTKLKPTGRKYIFGYHPHGIIGMGAFGGIATEGAGWSKLFPGIPVSLMTLTNNFRVPLFREYLMSLGVASVSKKSCKALLKRNQSICIVVGGAQESLLARPGVMDLVLLKRKGFVRLGMEVGNVALVPIMAFGENDLYDQVSNDKSSKLYRFQQFVKNFLGFTLPLMHARGVFNYDVGLVPYRRPVNIVVGSPIDLPYLPHPTDEEVSEYHDRYIAELQRIYNEHKDEYFIDWTEEGKGAPEFRMIE

SEQ ID NO: 84 - DNA, 34 bp, Artificial Sequence
  primer YlD2_Y326L-5
cttccgagtgcctctcctcagagagtacctcatg

SEQ ID NO: 85 - DNA, 34 bp, Artificial Sequence
  primer YlD2_Y326L-3
catgaggtactctctgaggagaggcactcggaag

SEQ ID NO: 86 - DNA, 5079 bp, Artificial Sequence
  plasmid pKR1254_Y326L
aattccagcacactggcggccgttactagtggatccgagctcggtaccaagcttgatgcatagcttgagtattctaacgcgtcacctaaatagcttggcgtaatcatggtcatagctgtttcctgtgtgaaattgttatccgctcacaattccacacaacatacgagccggaagcataaagtgtaaagcctggggtgcctaatgagtgagctaactcacattaattgcgttgcgctcactgcccgctttccagtcgggaaacctgtcgtgccagctgcattaatgaatcggccaacgcgcggggagaggcggtttgcgtattgggcgctcttccgcttcctcgctcactgactcgctgcgctcggtcgttcggctgcggcgagcggtatcagctcactcaaaggcggtaatacggttatccacagaatcaggggataacgcaggaaagaacatgtgagcaaaaggccagcaaaagcccaggaaccgtaaaaaggccgcgttgctggcgtttttccataggctccgcccccctgacgagcatcacaaaaatcgacgctcaagtcagaggtggcgaaacccgacaggactataaagataccaggcgtttccccctggaagctccctcgtgcgctctcctgttccgaccctgccgcttaccggatacctgtccgcctttctcccttcgggaagcgtggcgctttctcatagctcacgctgtaggtatctcagttcggtgtaggtcgttcgctccaagctgggctgtgtgcacgaaccccccgttcagcccgaccgctgcgccttatccggtaactatcgtcttgagtccaacccggtaagacacgacttatcgccactggcagcagccactggtaacaggattagcagagcgaggtatgtaggcggtgctacagagttcttgaagtggtggcctaactacggctacactagaaggacagtatttggtatctgcgctctgctgaagccagttaccttcggaaaaagagttggtagctcttgatccggcaaacaaaccaccgctggtagcggtggtttttttgtttgcaagcagcagattacgcgcagaaaaaaaggatctcaagaagatcctttgatcttttctacggggtctgacgctcagtggaacgaaaactcacgttaagggattttggtcatgagattatcaaaaaggatcttcacctagatccttttaaattaaaaatgaagttttagcacgtgtcagtcctgctcctcggccacgaagtgcacgcagttgccggccgggtcgcgcagggcgaactcccgcccccacggctgctcgccgatctcggtcatggccggcccggaggcgtcccggaagttcgtggacacgacctccgaccactcggcgtacagctcgtccaggccgcgcacccacacccaggccagggtgttgtccggcaccacctggtcctggaccgcgctgatgaacagggtcacgtcgtcccggaccacaccggcgaagtcgtcctccacgaagtcccgggagaacccgagccggtcggtccagaactcgaccgctccggcgacgtcgcgcgcggtgagcaccggaacggcactggtcaacttggccatggtggccctcctcacgtgctattattgaagcatttatcagggttattgtctcatgagcggatacatatttgaatgtatttagaaaaataaacaaataggggttccgcgcacatttccccgaaaagtgccacctgtatgcggtgtgaaataccgcacagatgcgtaaggagaaaataccgcatcaggaaattgtaagcgttaataattcagaagaactcgtcaagaaggcgatagaaggcgatgcgctgcgaatcgggagcggcgataccgtaaagcacgaggaagcggtcagcccattcgccgccaagctcttcagcaatatcacgggtagccaacgctatgtcctgatagcggtccgccacacccagccggccacagtcgatgaatccagaaaagcggccattttccaccatgatattcggcaagcaggcatcgccatgggtcacgacgagatcctcgccgtcgggcatgctcgccttgagcctggcgaacagttcggctggcgcgagcccctgatgctcttcgtccagatcatcctgatcgacaagaccggcttccatccgagtacgtgctcgctcgatgcgatgtttcgcttggtggtcgaatgggcaggtagccggatcaagcgtatgcagccgccgcattgcatcagccatgatggatactttctcggcaggagcaaggtgagatgacaggagatcctgccccggcacttcgcccaatagcagccagtcccttcccgcttcagtgacaacgtcgagcacagctgcgcaaggaacgcccgtcgtggccagccacgatagccgcgctgcctcgtcttgcagttcattcagggcaccggacaggtcggtcttgacaaaaagaaccgggcgcccctgcgctgacagccggaacacggcggcatcagagcagccgattgtctgttgtgcccagtcatagccgaatagcctctccacccaagcggccggagaacctgcgtgcaatccatcttgttcaatcatgcgaaacgatcctcatcctgtctcttgatcagagcttgatcccctgcgccatcagatccttggcggcgagaaagccatccagtttactttgcagggcttcccaaccttaccagagggcgccccagctggcaattccggttcgcttgctgtccataaaaccgcccagtctagctatcgccatgtaagcccactgcaagctacctgctttctctttgcgcttgcgttttcccttgtccagatagcccagtagctgacattcatccggggtcagcaccgtttctgcggactggctttctacgtgaaaaggatctaggtgaagatcctttttgataatctcatgcctgacatttatattccccagaacatcaggttaatggcgtttttgatgtcattttcgcggtggctgagatcagccacttcttccccgataacggagaccggcacactggccatatcggtggtcatcatgcgccagctttcatccccgatatgcaccaccgggtaaagttcacgggagactttatctgacagcagacgtgcactggccagggggatcaccatccgtcgccccggcgtgtcaataatatcactctgtacatccacaaacagacgataacggctctctcttttataggtgtaaaccttaaactgccgtacgtataggctgcgcaactgttgggaagggcgatcggtgcgggcctcttcgctattacgccagctggcgaaagggggatgtgctgcaaggcgattaagttgggtaacgccagggttttcccagtcacgacgttgtaaaacgacggccagtgaattgtaatacgactcactatagggcgaattgggccctctagatgcatgctcgagcggccgccagtgtgatggatatctgcagaattcaggagcggccgcaacatgactatcgactcacaatactacaagtcgcgagacaaaaacgacacggcacccaaaatcgcgggaatccgatatgccccgctatcgacaccattactcaaccgatgtgagaccttctctctggtctggcacattttcagcattcccactttcctcacaattttcatgctatgctgcgcaattccactgctctggccatttgtgattgcgtatgtagtgtacgctgttaaagacgactccccgtccaacggaggagtggtcaagcgatactcgcctatttcaagaaacttcttcatctggaagctctttggccgctacttccccataactctgcacaagacggtggatctggagcccacgcacacatactaccctctggacgtccaggagtatcacctgattgctgagagatactggccgcagaacaagtacctccgagcaatcatcaccaccatcgagtactttctgcccgccttcatgaaacggtctctttctatcaacgagcaggagcagcctgccgagcgagatcctctcctgtctcccgtttctcccagctctccgggttctcaacctgacaagtggattaaccacgacagcagatatagccgtggagaatcatctggctccaacggccacgcctcgggctccgaacttaacggcaacggcaacaacggcaccactaaccgacgacctttgtcgtccgcctctgctggctccactgcatctgattccacgcttcttaacgggtccctcaactcctacgccaaccagatcattggcgaaaacgacccacagctgtcgcccacaaaactcaagcccactggcagaaaatacatcttcggctaccacccccacggcattatcggcatgggagcctttggtggaattgccaccgagggagctggatggtccaagctctttccgggcatccctgtttctcttatgactctcaccaacaacttccgagtgcctctcctcagagagtacctcatgagtctgggagtcgcttctgtctccaagaagtcctgcaaggccctcctcaagcgaaaccagtctatctgcattgtcgttggtggagcacaggaaagtcttctggccagacccggtgtcatggacctggtgctactcaagcgaaagggttttgttcgacttggtatggaggtcggaaatgtcgcccttgttcccatcatggcctttggtgagaacgacctctatgaccaggttagcaacgacaagtcgtccaagctgtaccgattccagcagtttgtcaagaacttccttggattcacccttcctttgatgcatgcccgaggcgtcttcaactacgatgtcggtcttgtcccctacaggcgacccgtcaacattgtggttggttcccccattgacttgccttatctcccacaccccaccgacgaagaagtgtccgaataccacgaccgatacatcgccgagctgcagcgaatctacaacgagcacaaggatgaatatttcatcgattggaccgaggagggcaaaggagccccagagttccgaatgattgagtaagcggccgcacctg

SEQ ID NO: 87 - DNA, 1545 bp, Yarrowia lipolytica
atgactatcgactcacaatactacaagtcgcgagacaaaaacgacacggcacccaaaatcgcgggaatccgatatgccccgctatcgacaccattactcaaccgatgtgagaccttctctctggtctggcacattttcagcattcccactttcctcacaattttcatgctatgctgcgcaattccactgctctggccatttgtgattgcgtatgtagtgtacgctgttaaagacgactccccgtccaacggaggagtggtcaagcgatactcgcctatttcaagaaacttcttcatctggaagctctttggccgctacttccccataactctgcacaagacggtggatctggagcccacgcacacatactaccctctggacgtccaggagtatcacctgattgctgagagatactggccgcagaacaagtacctccgagcaatcatcaccaccatcgagtactttctgcccgccttcatgaaacggtctctttctatcaacgagcaggagcagcctgccgagcgagatcctctcctgtctcccgtttctcccagctctccgggttctcaacctgacaagtggattaaccacgacagcagatatagccgtggagaatcatctggctccaacggccacgcctcgggctccgaacttaacggcaacggcaacaacggcaccactaaccgacgacctttgtcgtccgcctctgctggctccactgcatctgattccacgcttcttaacgggtccctcaactcctacgccaaccagatcattggcgaaaacgacccacagctgtcgcccacaaaactcaagcccactggcagaaaatacatcttcggctaccacccccacggcattatcggcatgggagcctttggtggaattgccaccgagggagctggatggtccaagctctttccgggcatccctgtttctcttatgactctcaccaacaacttccgagtgcctctcctcagagagtacctcatgagtctgggagtcgcttctgtctccaagaagtcctgcaaggccctcctcaagcgaaaccagtctatctgcattgtcgttggtggagcacaggaaagtcttctggccagacccggtgtcatggacctggtgctactcaagcgaaagggttttgttcgacttggtatggaggtcggaaatgtcgcccttgttcccatcatggcctttggtgagaacgacctctatgaccaggttagcaacgacaagtcgtccaagctgtaccgattccagcagtttgtcaagaacttccttggattcacccttcctttgatgcatgcccgaggcgtcttcaactacgatgtcggtcttgtcccctacaggcgacccgtcaacattgtggttggttcccccattgacttgccttatctcccacaccccaccgacgaagaagtgtccgaataccacgaccgatacatcgccgagctgcagcgaatctacaacgagcacaaggatgaatatttcatcgattggaccgaggagggcaaaggagccccagagttccgaatgattgagtaa

SEQ ID NO: 88 - protein, 514 aa, Yarrowia lipolytica
MTIDSQYYKSRDKNDTAPKIAGIRYAPLSTPLLNRCETFSLVWHIFSIPTFLTIFMLCCAIPLLWPFVIAYVVYAVKDDSPSNGGVVKRYSPISRNFFIWKLFGRYFPITLHKTVDLEPTHTYYPLDVQEYHLIAERYWPQNKYLRAIITTIEYFLPAFMKRSLSINEQEQPAERDPLLSPVSPSSPGSQPDKWINHDSRYSRGESSGSNGHASGSELNGNGNNGTTNRRPLSSASAGSTASDSTLLNGSLNSYANQIIGENDPQLSPTKLKPTGRKYIFGYHPHGIIGMGAFGGIATEGAGWSKLFPGIPVSLMTLTNNFRVPLLREYLMSLGVASVSKKSCKALLKRNQSICIVVGGAQESLLARPGVMDLVLLKRKGFVRLGMEVGNVALVPIMAFGENDLYDQVSNDKSSKLYRFQQFVKNFLGFTLPLMHARGVFNYDVGLVPYRRPVNIVVGSPIDLPYLPHPTDEEVSEYHDRYIAELQRIYNEHKDEYFIDWTEEGKGAPEFRMIE

SEQ ID NO: 89 - DNA, 35 bp, Artificial Sequence
  primer YlD2_R327K-5
ccgagtgcctctctacaaagagtacctcatgagtc

SEQ ID NO: 90 - DNA, 35 bp, Artificial Sequence
  primer YlD2_R327K-3
gactcatgaggtactctttgtagagaggcactcgg

SEQ ID NO: 91 - DNA, 5079 bp, Artificial Sequence
  plasmid pKR1254_R327K
aattccagcacactggcggccgttactagtggatccgagctcggtaccaagcttgatgcatagcttgagtattctaacgcgtcacctaaatagcttggcgtaatcatggtcatagctgtttcctgtgtgaaattgttatccgctcacaattccacacaacatacgagccggaagcataaagtgtaaagcctggggtgcctaatgagtgagctaactcacattaattgcgttgcgctcactgcccgctttccagtcgggaaacctgtcgtgccagctgcattaatgaatcggccaacgcgcggggagaggcggtttgcgtattgggcgctcttccgcttcctcgctcactgactcgctgcgctcggtcgttcggctgcggcgagcggtatcagctcactcaaaggcggtaatacggttatccacagaatcaggggataacgcaggaaagaacatgtgagcaaaaggccagcaaaagcccaggaaccgtaaaaaggccgcgttgctggcgtttttccataggctccgcccccctgacgagcatcacaaaaatcgacgctcaagtcagaggtggcgaaacccgacaggactataaagataccaggcgtttccccctggaagctccctcgtgcgctctcctgttccgaccctgccgcttaccggatacctgtccgcctttctcccttcgggaagcgtggcgctttctcatagctcacgctgtaggtatctcagttcggtgtaggtcgttcgctccaagctgggctgtgtgcacgaaccccccgttcagcccgaccgctgcgccttatccggtaactatcgtcttgagtccaacccggtaagacacgacttatcgccactggcagcagccactggtaacaggattagcagagcgaggtatgtaggcggtgctacagagttcttgaagtggtggcctaactacggctacactagaaggacagtatttggtatctgcgctctgctgaagccagttaccttcggaaaaagagttggtagctcttgatccggcaaacaaaccaccgctggtagcggtggtttttttgtttgcaagcagcagattacgcgcagaaaaaaaggatctcaagaagatcctttgatcttttctacggggtctgacgctcagtggaacgaaaactcacgttaagggattttggtcatgagattatcaaaaaggatcttcacctagatccttttaaattaaaaatgaagttttagcacgtgtcagtcctgctcctcggccacgaagtgcacgcagttgccggccgggtcgcgcagggcgaactcccgcccccacggctgctcgccgatctcggtcatggccggcccggaggcgtcccggaagttcgtggacacgacctccgaccactcggcgtacagctcgtccaggccgcgcacccacacccaggccagggtgttgtccggcaccacctggtcctggaccgcgctgatgaacagggtcacgtcgtcccggaccacaccggcgaagtcgtcctccacgaagtcccgggagaacccgagccggtcggtccagaactcgaccgctccggcgacgtcgcgcgcggtgagcaccggaacggcactggtcaacttggccatggtggccctcctcacgtgctattattgaagcatttatcagggttattgtctcatgagcggatacatatttgaatgtatttagaaaaataaacaaataggggttccgcgcacatttccccgaaaagtgccacctgtatgcggtgtgaaataccgcacagatgcgtaaggagaaaataccgcatcaggaaattgtaagcgttaataattcagaagaactcgtcaagaaggcgatagaaggcgatgcgctgcgaatcgggagcggcgataccgtaaagcacgaggaagcggtcagcccattcgccgccaagctcttcagcaatatcacgggtagccaacgctatgtcctgatagcggtccgccacacccagccggccacagtcgatgaatccagaaaagcggccattttccaccatgatattcggcaagcaggcatcgccatgggtcacgacgagatcctcgccgtcgggcatgctcgccttgagcctggcgaacagttcggctggcgcgagcccctgatgctcttcgtccagatcatcctgatcgacaagaccggcttccatccgagtacgtgctcgctcgatgcgatgtttcgcttggtggtcgaatgggcaggtagccggatcaagcgtatgcagccgccgcattgcatcagccatgatggatactttctcggcaggagcaaggtgagatgacaggagatcctgccccggcacttcgcccaatagcagccagtcccttcccgcttcagtgacaacgtcgagcacagctgcgcaaggaacgcccgtcgtggccagccacgatagccgcgctgcctcgtcttgcagttcattcagggcaccggacaggtcggtcttgacaaaaagaaccgggcgcccctgcgctgacagccggaacacggcggcatcagagcagccgattgtctgttgtgcccagtcatagccgaatagcctctccacccaagcggccggagaacctgcgtgcaatccatcttgttcaatcatgcgaaacgatcctcatcctgtctcttgatcagagcttgatcccctgcgccatcagatccttggcggcgagaaagccatccagtttactttgcagggcttcccaaccttaccagagggcgccccagctggcaattccggttcgcttgctgtccataaaaccgcccagtctagctatcgccatgtaagcccactgcaagctacctgctttctctttgcgcttgcgttttcccttgtccagatagcccagtagctgacattcatccggggtcagcaccgtttctgcggactggctttctacgtgaaaaggatctaggtgaagatcctttttgataatctcatgcctgacatttatattccccagaacatcaggttaatggcgtttttgatgtcattttcgcggtggctgagatcagccacttcttccccgataacggagaccggcacactggccatatcggtggtcatcatgcgccagctttcatccccgatatgcaccaccgggtaaagttcacgggagactttatctgacagcagacgtgcactggccagggggatcaccatccgtcgccccggcgtgtcaataatatcactctgtacatccacaaacagacgataacggctctctcttttataggtgtaaaccttaaactgccgtacgtataggctgcgcaactgttgggaagggcgatcggtgcgggcctcttcgctattacgccagctggcgaaagggggatgtgctgcaaggcgattaagttgggtaacgccagggttttcccagtcacgacgttgtaaaacgacggccagtgaattgtaatacgactcactatagggcgaattgggccctctagatgcatgctcgagcggccgccagtgtgatggatatctgcagaattcaggagcggccgcaacatgactatcgactcacaatactacaagtcgcgagacaaaaacgacacggcacccaaaatcgcgggaatccgatatgccccgctatcgacaccattactcaaccgatgtgagaccttctctctggtctggcacattttcagcattcccactttcctcacaattttcatgctatgctgcgcaattccactgctctggccatttgtgattgcgtatgtagtgtacgctgttaaagacgactccccgtccaacggaggagtggtcaagcgatactcgcctatttcaagaaacttcttcatctggaagctctttggccgctacttccccataactctgcacaagacggtggatctggagcccacgcacacatactaccctctggacgtccaggagtatcacctgattgctgagagatactggccgcagaacaagtacctccgagcaatcatcaccaccatcgagtactttctgcccgccttcatgaaacggtctctttctatcaacgagcaggagcagcctgccgagcgagatcctctcctgtctcccgtttctcccagctctccgggttctcaacctgacaagtggattaaccacgacagcagatatagccgtggagaatcatctggctccaacggccacgcctcgggctccgaacttaacggcaacggcaacaacggcaccactaaccgacgacctttgtcgtccgcctctgctggctccactgcatctgattccacgcttcttaacgggtccctcaactcctacgccaaccagatcattggcgaaaacgacccacagctgtcgcccacaaaactcaagcccactggcagaaaatacatcttcggctaccacccccacggcattatcggcatgggagcctttggtggaattgccaccgagggagctggatggtccaagctctttccgggcatccctgtttctcttatgactctcaccaacaacttccgagtgcctctctacaaagagtacctcatgagtctgggagtcgcttctgtctccaagaagtcctgcaaggccctcctcaagcgaaaccagtctatctgcattgtcgttggtggagcacaggaaagtcttctggccagacccggtgtcatggacctggtgctactcaagcgaaagggttttgttcgacttggtatggaggtcggaaatgtcgcccttgttcccatcatggcctttggtgagaacgacctctatgaccaggttagcaacgacaagtcgtccaagctgtaccgattccagcagtttgtcaagaacttccttggattcacccttcctttgatgcatgcccgaggcgtcttcaactacgatgtcggtcttgtcccctacaggcgacccgtcaacattgtggttggttcccccattgacttgccttatctcccacaccccaccgacgaagaagtgtccgaataccacgaccgatacatcgccgagctgcagcgaatctacaacgagcacaaggatgaatatttcatcgattggaccgaggagggcaaaggagccccagagttccgaatgattgagtaagcggccgcacctg

SEQ ID NO: 92 - DNA, 1545 bp, Yarrowia lipolytica
atgactatcgactcacaatactacaagtcgcgagacaaaaacgacacggcacccaaaatcgcgggaatccgatatgccccgctatcgacaccattactcaaccgatgtgagaccttctctctggtctggcacattttcagcattcccactttcctcacaattttcatgctatgctgcgcaattccactgctctggccatttgtgattgcgtatgtagtgtacgctgttaaagacgactccccgtccaacggaggagtggtcaagcgatactcgcctatttcaagaaacttcttcatctggaagctctttggccgctacttccccataactctgcacaagacggtggatctggagcccacgcacacatactaccctctggacgtccaggagtatcacctgattgctgagagatactggccgcagaacaagtacctccgagcaatcatcaccaccatcgagtactttctgcccgccttcatgaaacggtctctttctatcaacgagcaggagcagcctgccgagcgagatcctctcctgtctcccgtttctcccagctctccgggttctcaacctgacaagtggattaaccacgacagcagatatagccgtggagaatcatctggctccaacggccacgcctcgggctccgaacttaacggcaacggcaacaacggcaccactaaccgacgacctttgtcgtccgcctctgctggctccactgcatctgattccacgcttcttaacgggtccctcaactcctacgccaaccagatcattggcgaaaacgacccacagctgtcgcccacaaaactcaagcccactggcagaaaatacatcttcggctaccacccccacggcattatcggcatgggagcctttggtggaattgccaccgagggagctggatggtccaagctctttccgggcatccctgtttctcttatgactctcaccaacaacttccgagtgcctctctacaaagagtacctcatgagtctgggagtcgcttctgtctccaagaagtcctgcaaggccctcctcaagcgaaaccagtctatctgcattgtcgttggtggagcacaggaaagtcttctggccagacccggtgtcatggacctggtgctactcaagcgaaagggttttgttcgacttggtatggaggtcggaaatgtcgcccttgttcccatcatggcctttggtgagaacgacctctatgaccaggttagcaacgacaagtcgtccaagctgtaccgattccagcagtttgtcaagaacttccttggattcacccttcctttgatgcatgcccgaggcgtcttcaactacgatgtcggtcttgtcccctacaggcgacccgtcaacattgtggttggttcccccattgacttgccttatctcccacaccccaccgacgaagaagtgtccgaataccacgaccgatacatcgccgagctgcagcgaatctacaacgagcacaaggatgaatatttcatcgattggaccgaggagggcaaaggagccccagagttccgaatgattgagtaa

SEQ ID NO: 93 - protein, 514 aa, Yarrowia lipolytica
MTIDSQYYKSRDKNDTAPKIAGIRYAPLSTPLLNRCETFSLVWHIFSIPTFLTIFMLCCAIPLLWPFVIAYVVYAVKDDSPSNGGVVKRYSPISRNFFIWKLFGRYFPITLHKTVDLEPTHTYYPLDVQEYHLIAERYWPQNKYLRAIITTIEYFLPAFMKRSLSINEQEQPAERDPLLSPVSPSSPGSQPDKWINHDSRYSRGESSGSNGHASGSELNGNGNNGTTNRRPLSSASAGSTASDSTLLNGSLNSYANQIIGENDPQLSPTKLKPTGRKYIFGYHPHGIIGMGAFGGIATEGAGWSKLFPGIPVSLMTLTNNFRVPLYKEYLMSLGVASVSKKSCKALLKRNQSICIVVGGAQESLLARPGVMDLVLLKRKGFVRLGMEVGNVALVPIMAFGENDLYDQVSNDKSSKLYRFQQFVKNFLGFTLPLMHARGVFNYDVGLVPYRRPVNIVVGSPIDLPYLPHPTDEEVSEYHDRYIAELQRIYNEHKDEYFIDWTEEGKGAPEFRMIE

SEQ ID NO: 94 - DNA, 9074 bp, Artificial Sequence
  plasmid pY191
ggccgcagggcggatcccccgggctgcaggaattcgatatcaagcttatcgataccgtcgacctcgagggggggcccggtacccaattcgccctatagtgagtcgtattacgcgcgctcactggccgtcgttttacaacgtcgtgactgggaaaaccctggcgttacccaacttaatcgccttgcagcacatccccctttcgccagctggcgtaatagcgaagaggcccgcaccgatcgcccttcccaacagttgcgcagcctgaatggcgaatggcgcgacgcgccctgtagcggcgcattaagcgcggcgggtgtggtggttacgcgcagcgtgaccgctacacttgccagcgccctagcgcccgctcctttcgctttcttcccttcctttctcgccacgttcgccggctttccccgtcaagctctaaatcgggggctccctttagggttccgatttagtgctttacggcacctcgaccccaaaaaacttgattagggtgatggttcacgtagtgggccatcgccctgatagacggtttttcgccctttgacgttggagtccacgttctttaatagtggactcttgttccaaactggaacaacactcaaccctatctcggtctattcttttgatttataagggattttgccgatttcggcctattggttaaaaaatgagctgatttaacaaaaatttaacgcgaattttaacaaaatattaacgtttacaatttcctgatgcggtattttctccttacgcatctgtgcggtatttcacaccgcatatcgacggtcgaggagaacttctagtatatccacatacctaatattattgccttattaaaaatggaatcccaacaattacatcaaaatccacattctcttcaaaatcaattgtcctgtacttccttgttcatgtgtgttcaaaaacgttatatttataggataattatactctatttctcaacaagtaattggttgtttggccgagcggtctaaggcgcctgattcaagaaatatcttgaccgcagttaactgtgggaatactcaggtatcgtaagatgcaagagttcgaatctcttagcaaccattatttttttcctcaacataacgagaacacacaggggcgctatcgcacagaatcaaattcgatgactggaaattttttgttaatttcagaggtcgcctgacgcatatacctttttcaactgaaaaattgggagaaaaaggaaaggtgagaggccggaaccggcttttcatatagaatagagaagcgttcatgactaaatgcttgcatcacaatacttgaagttgacaatattatttaaggacctattgttttttccaataggtggttagcaatcgtcttactttctaacttttcttaccttttacatttcagcaatatatatatatatttcaaggatataccattctaatgtctgcccctatgtctgcccctaagaagatcgtcgttttgccaggtgaccacgttggtcaagaaatcacagccgaagccattaaggttcttaaagctatttctgatgttcgttccaatgtcaagttcgatttcgaaaatcatttaattggtggtgctgctatcgatgctacaggtgtcccacttccagatgaggcgctggaagcctccaagaaggttgatgccgttttgttaggtgctgtggctggtcctaaatggggtaccggtagtgttagacctgaacaaggtttactaaaaatccgtaaagaacttcaattgtacgccaacttaagaccatgtaactttgcatccgactctcttttagacttatctccaatcaagccacaatttgctaaaggtactgacttcgttgttgtcagagaattagtgggaggtatttactttggtaagagaaaggaagacgatggtgatggtgtcgcttgggatagtgaacaatacaccgttccagaagtgcaaagaatcacaagaatggccgctttcatggccctacaacatgagccaccattgcctatttggtccttggataaagctaatcttttggcctcttcaagattatggagaaaaactgtggaggaaaccatcaagaacgaattccctacattgaaggttcaacatcaattgattgattctgccgccatgatcctagttaagaacccaacccacctaaatggtattataatcaccagcaacatgtttggtgatatcatctccgatgaagcctccgttatcccaggttccttgggtttgttgccatctgcgtccttggcctctttgccagacaagaacaccgcatttggtttgtacgaaccatgccacggttctgctccagatttgccaaagaataaggttgaccctatcgccactatcttgtctgctgcaatgatgttgaaattgtcattgaacttgcctgaagaaggtaaggccattgaagatgcagttaaaaaggttttggatgcaggtatcagaactggtgatttaggtggttccaacagtaccaccgaagtcggtgatgctgtcgccgaagaagttaagaaaatccttgcttaaaaagattctctttttttatgatatttgtacataaactttataaatgaaattcataatagaaacgacacgaaattacaaaatggaatatgttcatagggtagacgaaactatatacgcaatctacatacatttatcaagaaggagaaaaaggaggatagtaaaggaatacaggtaagcaaattgatactaatggctcaacgtgataaggaaaaagaattgcactttaacattaatattgacaaggaggagggcaccacacaaaaagttaggtgtaacagaaaatcatgaaactacgattcctaatttgatattggaggattttctctaaaaaaaaaaaaatacaacaaataaaaaacactcaatgacctgaccatttgatggagtttaagtcaataccttcttgaagcatttcccataatggtgaaagttccctcaagaattttactctgtcagaaacggccttacgacgtagtcgatatggtgcactctcagtacaatctgctctgatgccgcatagttaagccagccccgacacccgccaacacccgctgacgcgccctgacgggcttgtctgctcccggcatccgcttacagacaagctgtgaccgtctccgggagctgcatgtgtcagaggttttcaccgtcatcaccgaaacgcgcgagacgaaagggcctcgtgatacgcctatttttataggttaatgtcatgataataatggtttcttagtatgatccaatatcaaaggaaatgatagcattgaaggatgagactaatccaattgaggagtggcagcatatagaacagctaaagggtagtgctgaaggaagcatacgataccccgcatggaatgggataatatcacaggaggtactagactacctttcatcctacataaatagacgcatataagtacgcatttaagcataaacacgcactatgccgttcttctcatgtatatatatatacaggcaacacgcagatataggtgcgacgtgaacagtgagctgtatgtgcgcagctcgcgttgcattttcggaagcgctcgttttcggaaacgctttgaagttcctattccgaagttcctattctctagaaagtataggaacttcagagcgcttttgaaaaccaaaagcgctctgaagacgcactttcaaaaaaccaaaaacgcaccggactgtaacgagctactaaaatattgcgaataccgcttccacaaacattgctcaaaagtatctctttgctatatatctctgtgctatatccctatataacctacccatccacctttcgctccttgaacttgcatctaaactcgacctctacattttttatgtttatctctagtattactctttagacaaaaaaattgtagtaagaactattcatagagtgaatcgaaaacaatacgaaaatgtaaacatttcctatacgtagtatatagagacaaaatagaagaaaccgttcataattttctgaccaatgaagaatcatcaacgctatcactttctgttcacaaagtatgcgcaatccacatcggtatagaatataatcggggatgcctttatcttgaaaaaatgcacccgcagcttcgctagtaatcagtaaacgcgggaagtggagtcaggctttttttatggaagagaaaatagacaccaaagtagccttcttctaaccttaacggacctacagtgcaaaaagttatcaagagactgcattatagagcgcacaaaggagaaaaaaagtaatctaagatgctttgttagaaaaatagcgctctcgggatgcatttttgtagaacaaaaaagaagtatagattctttgttggtaaaatagcgctctcgcgttgcatttctgttctgtaaaaatgcagctcagattctttgtttgaaaaattagcgctctcgcgttgcatttttgttttacaaaaatgaagcacagattcttcgttggtaaaatagcgctttcgcgttgcatttctgttctgtaaaaatgcagctcagattctttgtttgaaaaattagcgctctcgcgttgcatttttgttctacaaaatgaagcacagatgcttcgttcaggtggcacttttcggggaaatgtgcgcggaacccctatttgtttatttttctaaatacattcaaatatgtatccgctcatgagacaataaccctgataaatgcttcaataatattgaaaaaggaagagtatgagtattcaacatttccgtgtcgcccttattcccttttttgcggcattttgccttcctgtttttgctcacccagaaacgctggtgaaagtaaaagatgctgaagatcagttgggtgcacgagtgggttacatcgaactggatctcaacagcggtaagatccttgagagttttcgccccgaagaacgttttccaatgatgagcacttttaaagttctgctatgtggcgcggtattatcccgtattgacgccgggcaagagcaactcggtcgccgcatacactattctcagaatgacttggttgagtactcaccagtcacagaaaagcatcttacggatggcatgacagtaagagaattatgcagtgctgccataaccatgagtgataacactgcggccaacttacttctgacaacgatcggaggaccgaaggagctaaccgcttttttgcacaacatgggggatcatgtaactcgccttgatcgttgggaaccggagctgaatgaagccataccaaacgacgagcgtgacaccacgatgcctgtagcaatggcaacaacgttgcgcaaactattaactggcgaactacttactctagcttcccggcaacaattaatagactggatggaggcggataaagttgcaggaccacttctgcgctcggcccttccggctggctggtttattgctgataaatctggagccggtgagcgtgggtctcgcggtatcattgcagcactggggccagatggtaagccctcccgtatcgtagttatctacacgacggggagtcaggcaactatggatgaacgaaatagacagatcgctgagataggtgcctcactgattaagcattggtaactgtcagaccaagtttactcatatatactttagattgatttaaaacttcatttttaatttaaaaggatctaggtgaagatcctttttgataatctcatgaccaaaatcccttaacgtgagttttcgttccactgagcgtcagaccccgtagaaaagatcaaaggatcttcttgagatcctttttttctgcgcgtaatctgctgcttgcaaacaaaaaaaccaccgctaccagcggtggtttgtttgccggatcaagagctaccaactctttttccgaaggtaactggcttcagcagagcgcagataccaaatactgtccttctagtgtagccgtagttaggccaccacttcaagaactctgtagcaccgcctacatacctcgctctgctaatcctgttaccagtggctgctgccagtggcgataagtcgtgtcttaccgggttggactcaagacgatagttaccggataaggcgcagcggtcgggctgaacggggggttcgtgcacacagcccagcttggagcgaacgacctacaccgaactgagatacctacagcgtgagctatgagaaagcgccacgcttcccgaagggagaaaggcggacaggtatccggtaagcggcagggtcggaacaggagagcgcacgagggagcttccagggggaaacgcctggtatctttatagtcctgtcgggtttcgccacctctgacttgagcgtcgatttttgtgatgctcgtcaggggggcggagcctatggaaaaacgccagcaacgcggcctttttacggttcctggccttttgctggccttttgctcacatgttctttcctgcgttatcccctgattctgtggataaccgtattaccgcctttgagtgagctgataccgctcgccgcagccgaacgaccgagcgcagcgagtcagtgagcgaggaagcggaagagcgcccaatacgcaaaccgcctctccccgcgcgttggccgattcattaatgcagctggcacgacaggtttcccgactggaaagcgggcagtgagcgcaacgcaattaatgtgagttacctcactcattaggcaccccaggctttacactttatgcttccggctcctatgttgtgtggaattgtgagcggataacaatttcacacaggaaacagctatgaccatgattacgccaagcgcgcaattaaccctcactaaagggaacaaaagctggagctccaccgcgggatttcgaaactaagttcttggtgttttaaaactaaaaaaaagactaactataaaagtagaatttaagaagtttaagaaatagatttacagaattacaatcaatacctaccgtctttatatacttattagtcaagtaggggaataatttcagggaactggtttcaaccttttttttcagctttttccaaatcagagagagcagaaggtaatagaaggtgtaagaaaatgagatagatacatgcgtgggtcaattgccttgtgtcatcatttactccaggcaggttgcatcactccattgaggttgtgcccgttttttgcctgtttgtgcccctgttctctgtagttgcgctaagagaatggacctatgaactgatggttggtgaagaaaacaatattttggtgctgggattctttttttttctggatgccagcttaaaaagcgggctccattatatttagtggatgccaggaataaactgttcacccagacacctacgatgttatatattctgtgtaacccgccccctattttgggcatgtacgggttacagcagaattaaaaggctaattttttgactaaataaagttaggaaaatcactactattaattatttacgtattctttgaaatggcagtattgataatgataaactcgaaatcactagtggatccgcccagcggccgcaacatgactatcgactcacaatactacaagtcgcgagacaaaaacgacacggcacccaaaatcgcgggaatccgatatgccccgctatcgacaccattactcaaccgatgtgagaccttctctctggtctggcacattttcagcattcccactttcctcacaattttcatgctatgctgcgcaattccactgctctggccatttgtgattgcgtatgtagtgtacgctgttaaagacgactccccgtccaacggaggagtggtcaagcgatactcgcctatttcaagaaacttcttcatctggaagctctttggccgctacttccccataactctgcacaagacggtggatctggagcccacgcacacatactaccctctggacgtccaggagtatcacctgattgctgagagatactggccgcagaacaagtacctccgagcaatcatcaccaccatcgagtactttctgcccgccttcatgaaacggtctctttctatcaacgagcaggagcagcctgccgagcgagatcctctcctgtctcccgtttctcccagctctccgggttctcaacctgacaagtggattaaccacgacagcagatatagccgtggagaatcatctggctccaacggccacgcctcgggctccgaacttaacggcaacggcaacaacggcaccactaaccgacgacctttgtcgtccgcctctgctggctccactgcatctgattccacgcttcttaacgggtccctcaactcctacgccaaccagatcattggcgaaaacgacccacagctgtcgcccacaaaactcaagcccactggcagaaaatacatcttcggctaccacccccacggcattatcggcatgggagcctttggtggaattgccaccgagggagctggatggtccaagctctttccgggcatccctgtttctcttatgactctcaccaacaacttccgagtgcctctctacagagagtacctcatgagtctgggagtcgcttctgtctccaagaagtcctgcaaggccctcctcaagcgaaaccagtctatctgcattgtcgttggtggagcacaggaaagtcttctggccagacccggtgtcatggacctggtgctactcaagcgaaagggttttgttcgacttggtatggaggtcggaaatgtcgcccttgttcccatcatggcctttggtgagaacgacctctatgaccaggttagcaacgacaagtcgtccaagctgtaccgattccagcagtttgtcaagaacttccttggattcacccttcctttgatgcatgcccgaggcgtcttcaactacgatgtcggtcttgtcccctacaggcgacccgtcaacattgtggttggttcccccattgacttgccttatctcccacaccccaccgacgaagaagtgtccgaataccacgaccgatacatcgccgagctgcagcgaatctacaacgagcacaaggatgaatatttcatcgattggaccgaggagggcaaaggagccccagagttccgaatgattgagtaagc

SEQ ID NO: 95 - DNA, 9074 bp, Artificial Sequence
  plasmid pY192
ggccgcagggcggatcccccgggctgcaggaattcgatatcaagcttatcgataccgtcgacctcgagggggggcccggtacccaattcgccctatagtgagtcgtattacgcgcgctcactggccgtcgttttacaacgtcgtgactgggaaaaccctggcgttacccaacttaatcgccttgcagcacatccccctttcgccagctggcgtaatagcgaagaggcccgcaccgatcgcccttcccaacagttgcgcagcctgaatggcgaatggcgcgacgcgccctgtagcggcgcattaagcgcggcgggtgtggtggttacgcgcagcgtgaccgctacacttgccagcgccctagcgcccgctcctttcgctttcttcccttcctttctcgccacgttcgccggctttccccgtcaagctctaaatcgggggctccctttagggttccgatttagtgctttacggcacctcgaccccaaaaaacttgattagggtgatggttcacgtagtgggccatcgccctgatagacggtttttcgccctttgacgttggagtccacgttctttaatagtggactcttgttccaaactggaacaacactcaaccctatctcggtctattcttttgatttataagggattttgccgatttcggcctattggttaaaaaatgagctgatttaacaaaaatttaacgcgaattttaacaaaatattaacgtttacaatttcctgatgcggtattttctccttacgcatctgtgcggtatttcacaccgcatatcgacggtcgaggagaacttctagtatatccacatacctaatattattgccttattaaaaatggaatcccaacaattacatcaaaatccacattctcttcaaaatcaattgtcctgtacttccttgttcatgtgtgttcaaaaacgttatatttataggataattatactctatttctcaacaagtaattggttgtttggccgagcggtctaaggcgcctgattcaagaaatatcttgaccgcagttaactgtgggaatactcaggtatcgtaagatgcaagagttcgaatctcttagcaaccattatttttttcctcaacataacgagaacacacaggggcgctatcgcacagaatcaaattcgatgactggaaattttttgttaatttcagaggtcgcctgacgcatatacctttttcaactgaaaaattgggagaaaaaggaaaggtgagaggccggaaccggcttttcatatagaatagagaagcgttcatgactaaatgcttgcatcacaatacttgaagttgacaatattatttaaggacctattgttttttccaataggtggttagcaatcgtcttactttctaacttttcttaccttttacatttcagcaatatatatatatatttcaaggatataccattctaatgtctgcccctatgtctgcccctaagaagatcgtcgttttgccaggtgaccacgttggtcaagaaatcacagccgaagccattaaggttcttaaagctatttctgatgttcgttccaatgtcaagttcgatttcgaaaatcatttaattggtggtgctgctatcgatgctacaggtgtcccacttccagatgaggcgctggaagcctccaagaaggttgatgccgttttgttaggtgctgtggctggtcctaaatggggtaccggtagtgttagacctgaacaaggtttactaaaaatccgtaaagaacttcaattgtacgccaacttaagaccatgtaactttgcatccgactctcttttagacttatctccaatcaagccacaatttgctaaaggtactgacttcgttgttgtcagagaattagtgggaggtatttactttggtaagagaaaggaagacgatggtgatggtgtcgcttgggatagtgaacaatacaccgttccagaagtgcaaagaatcacaagaatggccgctttcatggccctacaacatgagccaccattgcctatttggtccttggataaagctaatcttttggcctcttcaagattatggagaaaaactgtggaggaaaccatcaagaacgaattccctacattgaaggttcaacatcaattgattgattctgccgccatgatcctagttaagaacccaacccacctaaatggtattataatcaccagcaacatgtttggtgatatcatctccgatgaagcctccgttatcccaggttccttgggtttgttgccatctgcgtccttggcctctttgccagacaagaacaccgcatttggtttgtacgaaccatgccacggttctgctccagatttgccaaagaataaggttgaccctatcgccactatcttgtctgctgcaatgatgttgaaattgtcattgaacttgcctgaagaaggtaaggccattgaagatgcagttaaaaaggttttggatgcaggtatcagaactggtgatttaggtggttccaacagtaccaccgaagtcggtgatgctgtcgccgaagaagttaagaaaatccttgcttaaaaagattctctttttttatgatatttgtacataaactttataaatgaaattcataatagaaacgacacgaaattacaaaatggaatatgttcatagggtagacgaaactatatacgcaatctacatacatttatcaagaaggagaaaaaggaggatagtaaaggaatacaggtaagcaaattgatactaatggctcaacgtgataaggaaaaagaattgcactttaacattaatattgacaaggaggagggcaccacacaaaaagttaggtgtaacagaaaatcatgaaactacgattcctaatttgatattggaggattttctctaaaaaaaaaaaaatacaacaaataaaaaacactcaatgacctgaccatttgatggagtttaagtcaataccttcttgaagcatttcccataatggtgaaagttccctcaagaattttactctgtcagaaacggccttacgacgtagtcgatatggtgcactctcagtacaatctgctctgatgccgcatagttaagccagccccgacacccgccaacacccgctgacgcgccctgacgggcttgtctgctcccggcatccgcttacagacaagctgtgaccgtctccgggagctgcatgtgtcagaggttttcaccgtcatcaccgaaacgcgcgagacgaaagggcctcgtgatacgcctatttttataggttaatgtcatgataataatggtttcttagtatgatccaatatcaaaggaaatgatagcattgaaggatgagactaatccaattgaggagtggcagcatatagaacagctaaagggtagtgctgaaggaagcatacgataccccgcatggaatgggataatatcacaggaggtactagactacctttcatcctacataaatagacgcatataagtacgcatttaagcataaacacgcactatgccgttcttctcatgtatatatatatacaggcaacacgcagatataggtgcgacgtgaacagtgagctgtatgtgcgcagctcgcgttgcattttcggaagcgctcgttttcggaaacgctttgaagttcctattccgaagttcctattctctagaaagtataggaacttcagagcgcttttgaaaaccaaaagcgctctgaagacgcactttcaaaaaaccaaaaacgcaccggactgtaacgagctactaaaatattgcgaataccgcttccacaaacattgctcaaaagtatctctttgctatatatctctgtgctatatccctatataacctacccatccacctttcgctccttgaacttgcatctaaactcgacctctacattttttatgtttatctctagtattactctttagacaaaaaaattgtagtaagaactattcatagagtgaatcgaaaacaatacgaaaatgtaaacatttcctatacgtagtatatagagacaaaatagaagaaaccgttcataattttctgaccaatgaagaatcatcaacgctatcactttctgttcacaaagtatgcgcaatccacatcggtatagaatataatcggggatgcctttatcttgaaaaaatgcacccgcagcttcgctagtaatcagtaaacgcgggaagtggagtcaggctttttttatggaagagaaaatagacaccaaagtagccttcttctaaccttaacggacctacagtgcaaaaagttatcaagagactgcattatagagcgcacaaaggagaaaaaaagtaatctaagatgctttgttagaaaaatagcgctctcgggatgcatttttgtagaacaaaaaagaagtatagattctttgttggtaaaatagcgctctcgcgttgcatttctgttctgtaaaaatgcagctcagattctttgtttgaaaaattagcgctctcgcgttgcatttttgttttacaaaaatgaagcacagattcttcgttggtaaaatagcgctttcgcgttgcatttctgttctgtaaaaatgcagctcagattctttgtttgaaaaattagcgctctcgcgttgcatttttgttctacaaaatgaagcacagatgcttcgttcaggtggcacttttcggggaaatgtgcgcggaacccctatttgtttatttttctaaatacattcaaatatgtatccgctcatgagacaataaccctgataaatgcttcaataatattgaaaaaggaagagtatgagtattcaacatttccgtgtcgcccttattcccttttttgcggcattttgccttcctgtttttgctcacccagaaacgctggtgaaagtaaaagatgctgaagatcagttgggtgcacgagtgggttacatcgaactggatctcaacagcggtaagatccttgagagttttcgccccgaagaacgttttccaatgatgagcacttttaaagttctgctatgtggcgcggtattatcccgtattgacgccgggcaagagcaactcggtcgccgcatacactattctcagaatgacttggttgagtactcaccagtcacagaaaagcatcttacggatggcatgacagtaagagaattatgcagtgctgccataaccatgagtgataacactgcggccaacttacttctgacaacgatcggaggaccgaaggagctaaccgcttttttgcacaacatgggggatcatgtaactcgccttgatcgttgggaaccggagctgaatgaagccataccaaacgacgagcgtgacaccacgatgcctgtagcaatggcaacaacgttgcgcaaactattaactggcgaactacttactctagcttcccggcaacaattaatagactggatggaggcggataaagttgcaggaccacttctgcgctcggcccttccggctggctggtttattgctgataaatctggagccggtgagcgtgggtctcgcggtatcattgcagcactggggccagatggtaagccctcccgtatcgtagttatctacacgacggggagtcaggcaactatggatgaacgaaatagacagatcgctgagataggtgcctcactgattaagcattggtaactgtcagaccaagtttactcatatatactttagattgatttaaaacttcatttttaatttaaaaggatctaggtgaagatcctttttgataatctcatgaccaaaatcccttaacgtgagttttcgttccactgagcgtcagaccccgtagaaaagatcaaaggatcttcttgagatcctttttttctgcgcgtaatctgctgcttgcaaacaaaaaaaccaccgctaccagcggtggtttgtttgccggatcaagagctaccaactctttttccgaaggtaactggcttcagcagagcgcagataccaaatactgtccttctagtgtagccgtagttaggccaccacttcaagaactctgtagcaccgcctacatacctcgctctgctaatcctgttaccagtggctgctgccagtggcgataagtcgtgtcttaccgggttggactcaagacgatagttaccggataaggcgcagcggtcgggctgaacggggggttcgtgcacacagcccagcttggagcgaacgacctacaccgaactgagatacctacagcgtgagctatgagaaagcgccacgcttcccgaagggagaaaggcggacaggtatccggtaagcggcagggtcggaacaggagagcgcacgagggagcttccagggggaaacgcctggtatctttatagtcctgtcgggtttcgccacctctgacttgagcgtcgatttttgtgatgctcgtcaggggggcggagcctatggaaaaacgccagcaacgcggcctttttacggttcctggccttttgctggccttttgctcacatgttctttcctgcgttatcccctgattctgtggataaccgtattaccgcctttgagtgagctgataccgctcgccgcagccgaacgaccgagcgcagcgagtcagtgagcgaggaagcggaagagcgcccaatacgcaaaccgcctctccccgcgcgttggccgattcattaatgcagctggcacgacaggtttcccgactggaaagcgggcagtgagcgcaacgcaattaatgtgagttacctcactcattaggcaccccaggctttacactttatgcttccggctcctatgttgtgtggaattgtgagcggataacaatttcacacaggaaacagctatgaccatgattacgccaagcgcgcaattaaccctcactaaagggaacaaaagctggagctccaccgcgggatttcgaaactaagttcttggtgttttaaaactaaaaaaaagactaactataaaagtagaatttaagaagtttaagaaatagatttacagaattacaatcaatacctaccgtctttatatacttattagtcaagtaggggaataatttcagggaactggtttcaaccttttttttcagctttttccaaatcagagagagcagaaggtaatagaaggtgtaagaaaatgagatagatacatgcgtgggtcaattgccttgtgtcatcatttactccaggcaggttgcatcactccattgaggttgtgcccgttttttgcctgtttgtgcccctgttctctgtagttgcgctaagagaatggacctatgaactgatggttggtgaagaaaacaatattttggtgctgggattctttttttttctggatgccagcttaaaaagcgggctccattatatttagtggatgccaggaataaactgttcacccagacacctacgatgttatatattctgtgtaacccgccccctattttgggcatgtacgggttacagcagaattaaaaggctaattttttgactaaataaagttaggaaaatcactactattaattatttacgtattctttgaaatggcagtattgataatgataaactcgaaatcactagtggatccgcccagcggccgcaacatgactatcgactcacaatactacaagtcgcgagacaaaaacgacacggcacccaaaatcgcgggaatccgatatgccccgctatcgacaccattactcaaccgatgtgagaccttctctctggtctggcacattttcagcattcccactttcctcacaattttcatgctatgctgcgcaattccactgctctggccatttgtgattgcgtatgtagtgtacgctgttaaagacgactccccgtccaacggaggagtggtcaagcgatactcgcctatttcaagaaacttcttcatctggaagctctttggccgctacttccccataactctgcacaagacggtggatctggagcccacgcacacatactaccctctggacgtccaggagtatcacctgattgctgagagatactggccgcagaacaagtacctccgagcaatcatcaccaccatcgagtactttctgcccgccttcatgaaacggtctctttctatcaacgagcaggagcagcctgccgagcgagatcctctcctgtctcccgtttctcccagctctccgggttctcaacctgacaagtggattaaccacgacagcagatatagccgtggagaatcatctggctccaacggccacgcctcgggctccgaacttaacggcaacggcaacaacggcaccactaaccgacgacctttgtcgtccgcctctgctggctccactgcatctgattccacgcttcttaacgggtccctcaactcctacgccaaccagatcattggcgaaaacgacccacagctgtcgcccacaaaactcaagcccactggcagaaaatacatcttcggctaccacccccacggcattatcggcatgggagcctttggtggaattgccaccgagggagctggatggtccaagctctttccgggcatccctgtttctcttatgactctcaccaacaacttccgagtgcctctcttcagagagtacctcatgagtctgggagtcgcttctgtctccaagaagtcctgcaaggccctcctcaagcgaaaccagtctatctgcattgtcgttggtggagcacaggaaagtcttctggccagacccggtgtcatggacctggtgctactcaagcgaaagggttttgttcgacttggtatggaggtcggaaatgtcgcccttgttcccatcatggcctttggtgagaacgacctctatgaccaggttagcaacgacaagtcgtccaagctgtaccgattccagcagtttgtcaagaacttccttggattcacccttcctttgatgcatgcccgaggcgtcttcaactacgatgtcggtcttgtcccctacaggcgacccgtcaacattgtggttggttcccccattgacttgccttatctcccacaccccaccgacgaagaagtgtccgaataccacgaccgatacatcgccgagctgcagcgaatctacaacgagcacaaggatgaatatttcatcgattggaccgaggagggcaaaggagccccagagttccgaatgattgagtaagc

SEQ ID NO: 96 - DNA, 9074 bp, Artificial Sequence
  plasmid pY193
ggccgcagggcggatcccccgggctgcaggaattcgatatcaagcttatcgataccgtcgacctcgagggggggcccggtacccaattcgccctatagtgagtcgtattacgcgcgctcactggccgtcgttttacaacgtcgtgactgggaaaaccctggcgttacccaacttaatcgccttgcagcacatccccctttcgccagctggcgtaatagcgaagaggcccgcaccgatcgcccttcccaacagttgcgcagcctgaatggcgaatggcgcgacgcgccctgtagcggcgcattaagcgcggcgggtgtggtggttacgcgcagcgtgaccgctacacttgccagcgccctagcgcccgctcctttcgctttcttcccttcctttctcgccacgttcgccggctttccccgtcaagctctaaatcgggggctccctttagggttccgatttagtgctttacggcacctcgaccccaaaaaacttgattagggtgatggttcacgtagtgggccatcgccctgatagacggtttttcgccctttgacgttggagtccacgttctttaatagtggactcttgttccaaactggaacaacactcaaccctatctcggtctattcttttgatttataagggattttgccgatttcggcctattggttaaaaaatgagctgatttaacaaaaatttaacgcgaattttaacaaaatattaacgtttacaatttcctgatgcggtattttctccttacgcatctgtgcggtatttcacaccgcatatcgacggtcgaggagaacttctagtatatccacatacctaatattattgccttattaaaaatggaatcccaacaattacatcaaaatccacattctcttcaaaatcaattgtcctgtacttccttgttcatgtgtgttcaaaaacgttatatttataggataattatactctatttctcaacaagtaattggttgtttggccgagcggtctaaggcgcctgattcaagaaatatcttgaccgcagttaactgtgggaatactcaggtatcgtaagatgcaagagttcgaatctcttagcaaccattatttttttcctcaacataacgagaacacacaggggcgctatcgcacagaatcaaattcgatgactggaaattttttgttaatttcagaggtcgcctgacgcatatacctttttcaactgaaaaattgggagaaaaaggaaaggtgagaggccggaaccggcttttcatatagaatagagaagcgttcatgactaaatgcttgcatcacaatacttgaagttgacaatattatttaaggacctattgttttttccaataggtggttagcaatcgtcttactttctaacttttcttaccttttacatttcagcaatatatatatatatttcaaggatataccattctaatgtctgcccctatgtctgcccctaagaagatcgtcgttttgccaggtgaccacgttggtcaagaaatcacagccgaagccattaaggttcttaaagctatttctgatgttcgttccaatgtcaagttcgatttcgaaaatcatttaattggtggtgctgctatcgatgctacaggtgtcccacttccagatgaggcgctggaagcctccaagaaggttgatgccgttttgttaggtgctgtggctggtcctaaatggggtaccggtagtgttagacctgaacaaggtttactaaaaatccgtaaagaacttcaattgtacgccaacttaagaccatgtaactttgcatccgactctcttttagacttatctccaatcaagccacaatttgctaaaggtactgacttcgttgttgtcagagaattagtgggaggtatttactttggtaagagaaaggaagacgatggtgatggtgtcgcttgggatagtgaacaatacaccgttccagaagtgcaaagaatcacaagaatggccgctttcatggccctacaacatgagccaccattgcctatttggtccttggataaagctaatcttttggcctcttcaagattatggagaaaaactgtggaggaaaccatcaagaacgaattccctacattgaaggttcaacatcaattgattgattctgccgccatgatcctagttaagaacccaacccacctaaatggtattataatcaccagcaacatgtttggtgatatcatctccgatgaagcctccgttatcccaggttccttgggtttgttgccatctgcgtccttggcctctttgccagacaagaacaccgcatttggtttgtacgaaccatgccacggttctgctccagatttgccaaagaataaggttgaccctatcgccactatcttgtctgctgcaatgatgttgaaattgtcattgaacttgcctgaagaaggtaaggccattgaagatgcagttaaaaaggttttggatgcaggtatcagaactggtgatttaggtggttccaacagtaccaccgaagtcggtgatgctgtcgccgaagaagttaagaaaatccttgcttaaaaagattctctttttttatgatatttgtacataaactttataaatgaaattcataatagaaacgacacgaaattacaaaatggaatatgttcatagggtagacgaaactatatacgcaatctacatacatttatcaagaaggagaaaaaggaggatagtaaaggaatacaggtaagcaaattgatactaatggctcaacgtgataaggaaaaagaattgcactttaacattaatattgacaaggaggagggcaccacacaaaaagttaggtgtaacagaaaatcatgaaactacgattcctaatttgatattggaggattttctctaaaaaaaaaaaaatacaacaaataaaaaacactcaatgacctgaccatttgatggagtttaagtcaataccttcttgaagcatttcccataatggtgaaagttccctcaagaattttactctgtcagaaacggccttacgacgtagtcgatatggtgcactctcagtacaatctgctctgatgccgcatagttaagccagccccgacacccgccaacacccgctgacgcgccctgacgggcttgtctgctcccggcatccgcttacagacaagctgtgaccgtctccgggagctgcatgtgtcagaggttttcaccgtcatcaccgaaacgcgcgagacgaaagggcctcgtgatacgcctatttttataggttaatgtcatgataataatggtttcttagtatgatccaatatcaaaggaaatgatagcattgaaggatgagactaatccaattgaggagtggcagcatatagaacagctaaagggtagtgctgaaggaagcatacgataccccgcatggaatgggataatatcacaggaggtactagactacctttcatcctacataaatagacgcatataagtacgcatttaagcataaacacgcactatgccgttcttctcatgtatatatatatacaggcaacacgcagatataggtgcgacgtgaacagtgagctgtatgtgcgcagctcgcgttgcattttcggaagcgctcgttttcggaaacgctttgaagttcctattccgaagttcctattctctagaaagtataggaacttcagagcgcttttgaaaaccaaaagcgctctgaagacgcactttcaaaaaaccaaaaacgcaccggactgtaacgagctactaaaatattgcgaataccgcttccacaaacattgctcaaaagtatctctttgctatatatctctgtgctatatccctatataacctacccatccacctttcgctccttgaacttgcatctaaactcgacctctacattttttatgtttatctctagtattactctttagacaaaaaaattgtagtaagaactattcatagagtgaatcgaaaacaatacgaaaatgtaaacatttcctatacgtagtatatagagacaaaatagaagaaaccgttcataattttctgaccaatgaagaatcatcaacgctatcactttctgttcacaaagtatgcgcaatccacatcggtatagaatataatcggggatgcctttatcttgaaaaaatgcacccgcagcttcgctagtaatcagtaaacgcgggaagtggagtcaggctttttttatggaagagaaaatagacaccaaagtagccttcttctaaccttaacggacctacagtgcaaaaagttatcaagagactgcattatagagcgcacaaaggagaaaaaaagtaatctaagatgctttgttagaaaaatagcgctctcgggatgcatttttgtagaacaaaaaagaagtatagattctttgttggtaaaatagcgctctcgcgttgcatttctgttctgtaaaaatgcagctcagattctttgtttgaaaaattagcgctctcgcgttgcatttttgttttacaaaaatgaagcacagattcttcgttggtaaaatagcgctttcgcgttgcatttctgttctgtaaaaatgcagctcagattctttgtttgaaaaattagcgctctcgcgttgcatttttgttctacaaaatgaagcacagatgcttcgttcaggtggcacttttcggggaaatgtgcgcggaacccctatttgtttatttttctaaatacattcaaatatgtatccgctcatgagacaataaccctgataaatgcttcaataatattgaaaaaggaagagtatgagtattcaacatttccgtgtcgcccttattcccttttttgcggcattttgccttcctgtttttgctcacccagaaacgctggtgaaagtaaaagatgctgaagatcagttgggtgcacgagtgggttacatcgaactggatctcaacagcggtaagatccttgagagttttcgccccgaagaacgttttccaatgatgagcacttttaaagttctgctatgtggcgcggtattatcccgtattgacgccgggcaagagcaactcggtcgccgcatacactattctcagaatgacttggttgagtactcaccagtcacagaaaagcatcttacggatggcatgacagtaagagaattatgcagtgctgccataaccatgagtgataacactgcggccaacttacttctgacaacgatcggaggaccgaaggagctaaccgcttttttgcacaacatgggggatcatgtaactcgccttgatcgttgggaaccggagctgaatgaagccataccaaacgacgagcgtgacaccacgatgcctgtagcaatggcaacaacgttgcgcaaactattaactggcgaactacttactctagcttcccggcaacaattaatagactggatggaggcggataaagttgcaggaccacttctgcgctcggcccttccggctggctggtttattgctgataaatctggagccggtgagcgtgggtctcgcggtatcattgcagcactggggccagatggtaagccctcccgtatcgtagttatctacacgacggggagtcaggcaactatggatgaacgaaatagacagatcgctgagataggtgcctcactgattaagcattggtaactgtcagaccaagtttactcatatatactttagattgatttaaaacttcatttttaatttaaaaggatctaggtgaagatcctttttgataatctcatgaccaaaatcccttaacgtgagttttcgttccactgagcgtcagaccccgtagaaaagatcaaaggatcttcttgagatcctttttttctgcgcgtaatctgctgcttgcaaacaaaaaaaccaccgctaccagcggtggtttgtttgccggatcaagagctaccaactctttttccgaaggtaactggcttcagcagagcgcagataccaaatactgtccttctagtgtagccgtagttaggccaccacttcaagaactctgtagcaccgcctacatacctcgctctgctaatcctgttaccagtggctgctgccagtggcgataagtcgtgtcttaccgggttggactcaagacgatagttaccggataaggcgcagcggtcgggctgaacggggggttcgtgcacacagcccagcttggagcgaacgacctacaccgaactgagatacctacagcgtgagctatgagaaagcgccacgcttcccgaagggagaaaggcggacaggtatccggtaagcggcagggtcggaacaggagagcgcacgagggagcttccagggggaaacgcctggtatctttatagtcctgtcgggtttcgccacctctgacttgagcgtcgatttttgtgatgctcgtcaggggggcggagcctatggaaaaacgccagcaacgcggcctttttacggttcctggccttttgctggccttttgctcacatgttctttcctgcgttatcccctgattctgtggataaccgtattaccgcctttgagtgagctgataccgctcgccgcagccgaacgaccgagcgcagcgagtcagtgagcgaggaagcggaagagcgcccaatacgcaaaccgcctctccccgcgcgttggccgattcattaatgcagctggcacgacaggtttcccgactggaaagcgggcagtgagcgcaacgcaattaatgtgagttacctcactcattaggcaccccaggctttacactttatgcttccggctcctatgttgtgtggaattgtgagcggataacaatttcacacaggaaacagctatgaccatgattacgccaagcgcgcaattaaccctcactaaagggaacaaaagctggagctccaccgcgggatttcgaaactaagttcttggtgttttaaaactaaaaaaaagactaactataaaagtagaatttaagaagtttaagaaatagatttacagaattacaatcaatacctaccgtctttatatacttattagtcaagtaggggaataatttcagggaactggtttcaaccttttttttcagctttttccaaatcagagagagcagaaggtaatagaaggtgtaagaaaatgagatagatacatgcgtgggtcaattgccttgtgtcatcatttactccaggcaggttgcatcactccattgaggttgtgcccgttttttgcctgtttgtgcccctgttctctgtagttgcgctaagagaatggacctatgaactgatggttggtgaagaaaacaatattttggtgctgggattctttttttttctggatgccagcttaaaaagcgggctccattatatttagtggatgccaggaataaactgttcacccagacacctacgatgttatatattctgtgtaacccgccccctattttgggcatgtacgggttacagcagaattaaaaggctaattttttgactaaataaagttaggaaaatcactactattaattatttacgtattctttgaaatggcagtattgataatgataaactcgaaatcactagtggatccgcccagcggccgcaacatgactatcgactcacaatactacaagtcgcgagacaaaaacgacacggcacccaaaatcgcgggaatccgatatgccccgctatcgacaccattactcaaccgatgtgagaccttctctctggtctggcacattttcagcattcccactttcctcacaattttcatgctatgctgcgcaattccactgctctggccatttgtgattgcgtatgtagtgtacgctgttaaagacgactccccgtccaacggaggagtggtcaagcgatactcgcctatttcaagaaacttcttcatctggaagctctttggccgctacttccccataactctgcacaagacggtggatctggagcccacgcacacatactaccctctggacgtccaggagtatcacctgattgctgagagatactggccgcagaacaagtacctccgagcaatcatcaccaccatcgagtactttctgcccgccttcatgaaacggtctctttctatcaacgagcaggagcagcctgccgagcgagatcctctcctgtctcccgtttctcccagctctccgggttctcaacctgacaagtggattaaccacgacagcagatatagccgtggagaatcatctggctccaacggccacgcctcgggctccgaacttaacggcaacggcaacaacggcaccactaaccgacgacctttgtcgtccgcctctgctggctccactgcatctgattccacgcttcttaacgggtccctcaactcctacgccaaccagatcattggcgaaaacgacccacagctgtcgcccacaaaactcaagcccactggcagaaaatacatcttcggctaccacccccacggcattatcggcatgggagcctttggtggaattgccaccgagggagctggatggtccaagctctttccgggcatccctgtttctcttatgactctcaccaacaacttccgagtgcctctcctcagagagtacctcatgagtctgggagtcgcttctgtctccaagaagtcctgcaaggccctcctcaagcgaaaccagtctatctgcattgtcgttggtggagcacaggaaagtcttctggccagacccggtgtcatggacctggtgctactcaagcgaaagggttttgttcgacttggtatggaggtcggaaatgtcgcccttgttcccatcatggcctttggtgagaacgacctctatgaccaggttagcaacgacaagtcgtccaagctgtaccgattccagcagtttgtcaagaacttccttggattcacccttcctttgatgcatgcccgaggcgtcttcaactacgatgtcggtcttgtcccctacaggcgacccgtcaacattgtggttggttcccccattgacttgccttatctcccacaccccaccgacgaagaagtgtccgaataccacgaccgatacatcgccgagctgcagcgaatctacaacgagcacaaggatgaatatttcatcgattggaccgaggagggcaaaggagccccagagttccgaatgattgagtaagc

SEQ ID NO: 97 - DNA, 9074 bp, Artificial Sequence
  plasmid pY194
ggccgcagggcggatcccccgggctgcaggaattcgatatcaagcttatcgataccgtcgacctcgagggggggcccggtacccaattcgccctatagtgagtcgtattacgcgcgctcactggccgtcgttttacaacgtcgtgactgggaaaaccctggcgttacccaacttaatcgccttgcagcacatccccctttcgccagctggcgtaatagcgaagaggcccgcaccgatcgcccttcccaacagttgcgcagcctgaatggcgaatggcgcgacgcgccctgtagcggcgcattaagcgcggcgggtgtggtggttacgcgcagcgtgaccgctacacttgccagcgccctagcgcccgctcctttcgctttcttcccttcctttctcgccacgttcgccggctttccccgtcaagctctaaatcgggggctccctttagggttccgatttagtgctttacggcacctcgaccccaaaaaacttgattagggtgatggttcacgtagtgggccatcgccctgatagacggtttttcgccctttgacgttggagtccacgttctttaatagtggactcttgttccaaactggaacaacactcaaccctatctcggtctattcttttgatttataagggattttgccgatttcggcctattggttaaaaaatgagctgatttaacaaaaatttaacgcgaattttaacaaaatattaacgtttacaatttcctgatgcggtattttctccttacgcatctgtgcggtatttcacaccgcatatcgacggtcgaggagaacttctagtatatccacatacctaatattattgccttattaaaaatggaatcccaacaattacatcaaaatccacattctcttcaaaatcaattgtcctgtacttccttgttcatgtgtgttcaaaaacgttatatttataggataattatactctatttctcaacaagtaattggttgtttggccgagcggtctaaggcgcctgattcaagaaatatcttgaccgcagttaactgtgggaatactcaggtatcgtaagatgcaagagttcgaatctcttagcaaccattatttttttcctcaacataacgagaacacacaggggcgctatcgcacagaatcaaattcgatgactggaaattttttgttaatttcagaggtcgcctgacgcatatacctttttcaactgaaaaattgggagaaaaaggaaaggtgagaggccggaaccggcttttcatatagaatagagaagcgttcatgactaaatgcttgcatcacaatacttgaagttgacaatattatttaaggacctattgttttttccaataggtggttagcaatcgtcttactttctaacttttcttaccttttacatttcagcaatatatatatatatttcaaggatataccattctaatgtctgcccctatgtctgcccctaagaagatcgtcgttttgccaggtgaccacgttggtcaagaaatcacagccgaagccattaaggttcttaaagctatttctgatgttcgttccaatgtcaagttcgatttcgaaaatcatttaattggtggtgctgctatcgatgctacaggtgtcccacttccagatgaggcgctggaagcctccaagaaggttgatgccgttttgttaggtgctgtggctggtcctaaatggggtaccggtagtgttagacctgaacaaggtttactaaaaatccgtaaagaacttcaattgtacgccaacttaagaccatgtaactttgcatccgactctcttttagacttatctccaatcaagccacaatttgctaaaggtactgacttcgttgttgtcagagaattagtgggaggtatttactttggtaagagaaaggaagacgatggtgatggtgtcgcttgggatagtgaacaatacaccgttccagaagtgcaaagaatcacaagaatggccgctttcatggccctacaacatgagccaccattgcctatttggtccttggataaagctaatcttttggcctcttcaagattatggagaaaaactgtggaggaaaccatcaagaacgaattccctacattgaaggttcaacatcaattgattgattctgccgccatgatcctagttaagaacccaacccacctaaatggtattataatcaccagcaacatgtttggtgatatcatctccgatgaagcctccgttatcccaggttccttgggtttgttgccatctgcgtccttggcctctttgccagacaagaacaccgcatttggtttgtacgaaccatgccacggttctgctccagatttgccaaagaataaggttgaccctatcgccactatcttgtctgctgcaatgatgttgaaattgtcattgaacttgcctgaagaaggtaaggccattgaagatgcagttaaaaaggttttggatgcaggtatcagaactggtgatttaggtggttccaacagtaccaccgaagtcggtgatgctgtcgccgaagaagttaagaaaatccttgcttaaaaagattctctttttttatgatatttgtacataaactttataaatgaaattcataatagaaacgacacgaaattacaaaatggaatatgttcatagggtagacgaaactatatacgcaatctacatacatttatcaagaaggagaaaaaggaggatagtaaaggaatacaggtaagcaaattgatactaatggctcaacgtgataaggaaaaagaattgcactttaacattaatattgacaaggaggagggcaccacacaaaaagttaggtgtaacagaaaatcatgaaactacgattcctaatttgatattggaggattttctctaaaaaaaaaaaaatacaacaaataaaaaacactcaatgacctgaccatttgatggagtttaagtcaataccttcttgaagcatttcccataatggtgaaagttccctcaagaattttactctgtcagaaacggccttacgacgtagtcgatatggtgcactctcagtacaatctgctctgatgccgcatagttaagccagccccgacacccgccaacacccgctgacgcgccctgacgggcttgtctgctcccggcatccgcttacagacaagctgtgaccgtctccgggagctgcatgtgtcagaggttttcaccgtcatcaccgaaacgcgcgagacgaaagggcctcgtgatacgcctatttttataggttaatgtcatgataataatggtttcttagtatgatccaatatcaaaggaaatgatagcattgaaggatgagactaatccaattgaggagtggcagcatatagaacagctaaagggtagtgctgaaggaagcatacgataccccgcatggaatgggataatatcacaggaggtactagactacctttcatcctacataaatagacgcatataagtacgcatttaagcataaacacgcactatgccgttcttctcatgtatatatatatacaggcaacacgcagatataggtgcgacgtgaacagtgagctgtatgtgcgcagctcgcgttgcattttcggaagcgctcgttttcggaaacgctttgaagttcctattccgaagttcctattctctagaaagtataggaacttcagagcgcttttgaaaaccaaaagcgctctgaagacgcactttcaaaaaaccaaaaacgcaccggactgtaacgagctactaaaatattgcgaataccgcttccacaaacattgctcaaaagtatctctttgctatatatctctgtgctatatccctatataacctacccatccacctttcgctccttgaacttgcatctaaactcgacctctacattttttatgtttatctctagtattactctttagacaaaaaaattgtagtaagaactattcatagagtgaatcgaaaacaatacgaaaatgtaaacatttcctatacgtagtatatagagacaaaatagaagaaaccgttcataattttctgaccaatgaagaatcatcaacgctatcactttctgttcacaaagtatgcgcaatccacatcggtatagaatataatcggggatgcctttatcttgaaaaaatgcacccgcagcttcgctagtaatcagtaaacgcgggaagtggagtcaggctttttttatggaagagaaaatagacaccaaagtagccttcttctaaccttaacggacctacagtgcaaaaagttatcaagagactgcattatagagcgcacaaaggagaaaaaaagtaatctaagatgctttgttagaaaaatagcgctctcgggatgcatttttgtagaacaaaaaagaagtatagattctttgttggtaaaatagcgctctcgcgttgcatttctgttctgtaaaaatgcagctcagattctttgtttgaaaaattagcgctctcgcgttgcatttttgttttacaaaaatgaagcacagattcttcgttggtaaaatagcgctttcgcgttgcatttctgttctgtaaaaatgcagctcagattctttgtttgaaaaattagcgctctcgcgttgcatttttgttctacaaaatgaagcacagatgcttcgttcaggtggcacttttcggggaaatgtgcgcggaacccctatttgtttatttttctaaatacattcaaatatgtatccgctcatgagacaataaccctgataaatgcttcaataatattgaaaaaggaagagtatgagtattcaacatttccgtgtcgcccttattcccttttttgcggcattttgccttcctgtttttgctcacccagaaacgctggtgaaagtaaaagatgctgaagatcagttgggtgcacgagtgggttacatcgaactggatctcaacagcggtaagatccttgagagttttcgccccgaagaacgttttccaatgatgagcacttttaaagttctgctatgtggcgcggtattatcccgtattgacgccgggcaagagcaactcggtcgccgcatacactattctcagaatgacttggttgagtactcaccagtcacagaaaagcatcttacggatggcatgacagtaagagaattatgcagtgctgccataaccatgagtgataacactgcggccaacttacttctgacaacgatcggaggaccgaaggagctaaccgcttttttgcacaacatgggggatcatgtaactcgccttgatcgttgggaaccggagctgaatgaagccataccaaacgacgagcgtgacaccacgatgcctgtagcaatggcaacaacgttgcgcaaactattaactggcgaactacttactctagcttcccggcaacaattaatagactggatggaggcggataaagttgcaggaccacttctgcgctcggcccttccggctggctggtttattgctgataaatctggagccggtgagcgtgggtctcgcggtatcattgcagcactggggccagatggtaagccctcccgtatcgtagttatctacacgacggggagtcaggcaactatggatgaacgaaatagacagatcgctgagataggtgcctcactgattaagcattggtaactgtcagaccaagtttactcatatatactttagattgatttaaaacttcatttttaatttaaaaggatctaggtgaagatcctttttgataatctcatgaccaaaatcccttaacgtgagttttcgttccactgagcgtcagaccccgtagaaaagatcaaaggatcttcttgagatcctttttttctgcgcgtaatctgctgcttgcaaacaaaaaaaccaccgctaccagcggtggtttgtttgccggatcaagagctaccaactctttttccgaaggtaactggcttcagcagagcgcagataccaaatactgtccttctagtgtagccgtagttaggccaccacttcaagaactctgtagcaccgcctacatacctcgctctgctaatcctgttaccagtggctgctgccagtggcgataagtcgtgtcttaccgggttggactcaagacgatagttaccggataaggcgcagcggtcgggctgaacggggggttcgtgcacacagcccagcttggagcgaacgacctacaccgaactgagatacctacagcgtgagctatgagaaagcgccacgcttcccgaagggagaaaggcggacaggtatccggtaagcggcagggtcggaacaggagagcgcacgagggagcttccagggggaaacgcctggtatctttatagtcctgtcgggtttcgccacctctgacttgagcgtcgatttttgtgatgctcgtcaggggggcggagcctatggaaaaacgccagcaacgcggcctttttacggttcctggccttttgctggccttttgctcacatgttctttcctgcgttatcccctgattctgtggataaccgtattaccgcctttgagtgagctgataccgctcgccgcagccgaacgaccgagcgcagcgagtcagtgagcgaggaagcggaagagcgcccaatacgcaaaccgcctctccccgcgcgttggccgattcattaatgcagctggcacgacaggtttcccgactggaaagcgggcagtgagcgcaacgcaattaatgtgagttacctcactcattaggcaccccaggctttacactttatgcttccggctcctatgttgtgtggaattgtgagcggataacaatttcacacaggaaacagctatgaccatgattacgccaagcgcgcaattaaccctcactaaagggaacaaaagctggagctccaccgcgggatttcgaaactaagttcttggtgttttaaaactaaaaaaaagactaactataaaagtagaatttaagaagtttaagaaatagatttacagaattacaatcaatacctaccgtctttatatacttattagtcaagtaggggaataatttcagggaactggtttcaaccttttttttcagctttttccaaatcagagagagcagaaggtaatagaaggtgtaagaaaatgagatagatacatgcgtgggtcaattgccttgtgtcatcatttactccaggcaggttgcatcactccattgaggttgtgcccgttttttgcctgtttgtgcccctgttctctgtagttgcgctaagagaatggacctatgaactgatggttggtgaagaaaacaatattttggtgctgggattctttttttttctggatgccagcttaaaaagcgggctccattatatttagtggatgccaggaataaactgttcacccagacacctacgatgttatatattctgtgtaacccgccccctattttgggcatgtacgggttacagcagaattaaaaggctaattttttgactaaataaagttaggaaaatcactactattaattatttacgtattctttgaaatggcagtattgataatgataaactcgaaatcactagtggatccgcccagcggccgcaacatgactatcgactcacaatactacaagtcgcgagacaaaaacgacacggcacccaaaatcgcgggaatccgatatgccccgctatcgacaccattactcaaccgatgtgagaccttctctctggtctggcacattttcagcattcccactttcctcacaattttcatgctatgctgcgcaattccactgctctggccatttgtgattgcgtatgtagtgtacgctgttaaagacgactccccgtccaacggaggagtggtcaagcgatactcgcctatttcaagaaacttcttcatctggaagctctttggccgctacttccccataactctgcacaagacggtggatctggagcccacgcacacatactaccctctggacgtccaggagtatcacctgattgctgagagatactggccgcagaacaagtacctccgagcaatcatcaccaccatcgagtactttctgcccgccttcatgaaacggtctctttctatcaacgagcaggagcagcctgccgagcgagatcctctcctgtctcccgtttctcccagctctccgggttctcaacctgacaagtggattaaccacgacagcagatatagccgtggagaatcatctggctccaacggccacgcctcgggctccgaacttaacggcaacggcaacaacggcaccactaaccgacgacctttgtcgtccgcctctgctggctccactgcatctgattccacgcttcttaacgggtccctcaactcctacgccaaccagatcattggcgaaaacgacccacagctgtcgcccacaaaactcaagcccactggcagaaaatacatcttcggctaccacccccacggcattatcggcatgggagcctttggtggaattgccaccgagggagctggatggtccaagctctttccgggcatccctgtttctcttatgactctcaccaacaacttccgagtgcctctctacaaagagtacctcatgagtctgggagtcgcttctgtctccaagaagtcctgcaaggccctcctcaagcgaaaccagtctatctgcattgtcgttggtggagcacaggaaagtcttctggccagacccggtgtcatggacctggtgctactcaagcgaaagggttttgttcgacttggtatggaggtcggaaatgtcgcccttgttcccatcatggcctttggtgagaacgacctctatgaccaggttagcaacgacaagtcgtccaagctgtaccgattccagcagtttgtcaagaacttccttggattcacccttcctttgatgcatgcccgaggcgtcttcaactacgatgtcggtcttgtcccctacaggcgacccgtcaacattgtggttggttcccccattgacttgccttatctcccacaccccaccgacgaagaagtgtccgaataccacgaccgatacatcgccgagctgcagcgaatctacaacgagcacaaggatgaatatttcatcgattggaccgaggagggcaaaggagccccagagttccgaatgattgagtaagc

SEQ ID NO: 98 - DNA, 8641 bp, Artificial Sequence
  plasmid pKR1256
ggccgcaagtatgaactaaaatgcatgtaggtgtaagagctcatggagagcatggaatattgtatccgaccatgtaacagtataataactgagctccatctcacttcttctatgaataaacaaaggatgttatgatatattaacactctatctatgcaccttattgttctatgataaatttcctcttattattataaatcatctgaatcgtgacggcttatggaatgcttcaaatagtacaaaaacaaatgtgtactataagactttctaaacaattctaaccttagcattgtgaacgagacataagtgttaagaagacataacaattataatggaagaagtttgtctccatttatatattatatattacccacttatgtattatattaggatgttaaggagacataacaattataaagagagaagtttgtatccatttatatattatatactacccatttatatattatacttatccacttatttaatgtctttataaggtttgatccatgatatttctaatattttagttgatatgtatatgaaagggtactatttgaactctcttactctgtataaaggttggatcatccttaaagtgggtctatttaattttattgcttcttacagataaaaaaaaaattatgagttggtttgataaaatattgaaggatttaaaataataataaataacatataatatatgtatataaatttattataatataacatttatctataaaaaagtaaatattgtcataaatctatacaatcgtttagccttgctggacgaatctcaattatttaaacgagagtaaacatatttgactttttggttatttaacaaattattatttaacactatatgaaatttttttttttatcagcaaagaataaaattaaattaagaaggacaatggtgtcccaatccttatacaaccaacttccacaagaaagtcaagtcagagacaacaaaaaaacaagcaaaggaaattttttaatttgagttgtcttgtttgctgcataatttatgcagtaaaacactacacataacccttttagcagtagagcaatggttgaccgtgtgcttagcttcttttattttatttttttatcagcaaagaataaataaaataaaatgagacacttcagggatgtttcaacaagcttggcgcgccgttctatagtgtcacctaaatcgtatgtgtatgatacataaggttatgtattaattgtagccgcgttctaacgacaatatgtccatatggtgcactctcagtacaatctgctctgatgccgcatagttaagccagccccgacacccgccaacacccgctgacgcgccctgacgggcttgtctgctcccggcatccgcttacagacaagctgtgaccgtctccgggagctgcatgtgtcagaggttttcaccgtcatcaccgaaacgcgcgagacgaaagggcctcgtgatacgcctatttttataggttaatgtcatgaccaaaatcccttaacgtgagttttcgttccactgagcgtcagaccccgtagaaaagatcaaaggatcttcttgagatcctttttttctgcgcgtaatctgctgcttgcaaacaaaaaaaccaccgctaccagcggtggtttgtttgccggatcaagagctaccaactctttttccgaaggtaactggcttcagcagagcgcagataccaaatactgtccttctagtgtagccgtagttaggccaccacttcaagaactctgtagcaccgcctacatacctcgctctgctaatcctgttaccagtggctgctgccagtggcgataagtcgtgtcttaccgggttggactcaagacgatagttaccggataaggcgcagcggtcgggctgaacggggggttcgtgcacacagcccagcttggagcgaacgacctacaccgaactgagatacctacagcgtgagcattgagaaagcgccacgcttcccgaagggagaaaggcggacaggtatccggtaagcggcagggtcggaacaggagagcgcacgagggagcttccagggggaaacgcctggtatctttatagtcctgtcgggtttcgccacctctgacttgagcgtcgatttttgtgatgctcgtcaggggggcggagcctatggaaaaacgccagcaacgcggcctttttacggttcctggccttttgctggccttttgctcacatgttctttcctgcgttatcccctgattctgtggataaccgtattaccgcctttgagtgagctgataccgctcgccgcagccgaacgaccgagcgcagcgagtcagtgagcgaggaagcggaagagcgcccaatacgcaaaccgcctctccccgcgcgttggccgattcattaatgcaggttgatcgattcgacatcgatctagtaacatagatgacaccgcgcgcgataatttatcctagtttgcgcgctatattttgttttctatcgcgtattaaatgtataattgcgggactctaatcataaaaacccatctcataaataacgtcatgcattacatgttaattattacatgcttaacgtaattcaacagaaattatatgataatcatcgcaagaccggcaacaggattcaatcttaagaaactttattgccaaatgtttgaacgatctgcttcgacgcactccttctttaggtacctcactattcctttgccctcggacgagtgctggggcgtcggtttccactatcggcgagtacttctacacagccatcggtccagacggccgcgcttctgcgggcgatttgtgtacgcccgacagtcccggctccggatcggacgattgcgtcgcatcgaccctgcgcccaagctgcatcatcgaaattgccgtcaaccaagctctgatagagttggtcaagaccaatgcggagcatatacgcccggagccgcggcgatcctgcaagctccggatgcctccgctcgaagtagcgcgtctgctgctccatacaagccaaccacggcctccagaagaagatgttggcgacctcgtattgggaatccccgaacatcgcctcgctccagtcaatgaccgctgttatgcggccattgtccgtcaggacattgttggagccgaaatccgcgtgcacgaggtgccggacttcggggcagtcctcggcccaaagcatcagctcatcgagagcctgcgcgacggacgcactgacggtgtcgtccatcacagtttgccagtgatacacatggggatcagcaatcgcgcatatgaaatcacgccatgtagtgtattgaccgattccttgcggtccgaatgggccgaacccgctcgtctggctaagatcggccgcagcgatcgcatccatggcctccgcgaccggctgcagaacagcgggcagttcggtttcaggcaggtcttgcaacgtgacaccctgtgcacggcgggagatgcaataggtcaggctctcgctgaattccccaatgtcaagcacttccggaatcgggagcgcggccgatgcaaagtgccgataaacataacgatctttgtagaaaccatcggcgcagctatttacccgcaggacatatccacgccctcctacatcgaagctgaaagcacgagattcttcgccctccgagagctgcatcaggtcggagacgctgtcgaacttttcgatcagaaacttctcgacagacgtcgcggtgagttcaggctttttcatggtttaataagaagagaaaagagttcttttgttatggctgaagtaatagagaaatgagctcgagcgtgtcctctccaaatgaaatgaacttccttatatagaggaagggtcttgcgaaggatagtgggattgtgcgtcatcccttacgtcagtggagatgtcacatcaatccacttgctttgaagacgtggttggaacgtcttctttttccacgatgctcctcgtgggtgggggtccatctttgggaccactgtcggcagaggcatcttgaatgatagcctttcctttatcgcaatgatggcatttgtaggagccaccttccttttctactgtcctttcgatgaagtgacagatagctgggcaatggaatccgaggaggtttcccgaaattatcctttgttgaaaagtctcaatagccctttggtcttctgagactgtatctttgacatttttggagtagaccagagtgtcgtgctccaccatgttgacgaagattttcttcttgtcattgagtcgtaaaagactctgtatgaactgttcgccagtcttcacggcgagttctgttagatcctcgatttgaatcttagactccatgcatggccttagattcagtaggaactacctttttagagactccaatctctattacttgccttggtttatgaagcaagccttgaatcgtccatactggaatagtacttctgatcttgagaaatatgtctttctctgtgttcttgatgcaattagtcctgaatcttttgactgcatctttaaccttcttgggaaggtatttgatctcctggagattgttactcgggtagatcgtcttgatgagacctgctgcgtaggcctctctaaccatctgtgggtcagcattctttctgaaattgaagaggctaaccttctcattatcagtggtgaacatagtgtcgtcaccttcaccttcgaacttccttcctagatcgtaaagatagaggaaatcgtccattgtaatctccggggcaaaggagatctcttttggggctggatcactgctgggccttttggttcctagcgtgagccagtgggctttttgctttggtgggcttgttagggccttagcaaagctcttgggcttgagttgagcttctcctttggggatgaagttcaacctgtctgtttgctgacttgttgtgtacgcgtcagctgctgctcttgcctctgtaatagtggcaaatttcttgtgtgcaactccgggaacgccgtttgttgccgcctttgtacaaccccagtcatcgtatataccggcatgtggaccgttatacacaacgtagtagttgatatgagggtgttgaatacccgattctgctctgagaggagcaactgtgctgttaagctcagatttttgtgggattggaattggatcgatctcgatcccgcgaaattaatacgactcactatagggagaccacaacggtttccctctagaaataattttgtttaactttaagaaggagatatacccatggaaaagcctgaactcaccgcgacgtctgtcgagaagtttctgatcgaaaagttcgacagcgtctccgacctgatgcagctctcggagggcgaagaatctcgtgctttcagcttcgatgtaggagggcgtggatatgtcctgcgggtaaatagctgcgccgatggtttctacaaagatcgttatgtttatcggcactttgcatcggccgcgctcccgattccggaagtgcttgacattggggaattcagcgagagcctgacctattgcatctcccgccgtgcacagggtgtcacgttgcaagacctgcctgaaaccgaactgcccgctgttctgcagccggtcgcggaggctatggatgcgatcgctgcggccgatcttagccagacgagcgggttcggcccattcggaccgcaaggaatcggtcaatacactacatggcgtgatttcatatgcgcgattgctgatccccatgtgtatcactggcaaactgtgatggacgacaccgtcagtgcgtccgtcgcgcaggctctcgatgagctgatgctttgggccgaggactgccccgaagtccggcacctcgtgcacgcggatttcggctccaacaatgtcctgacggacaatggccgcataacagcggtcattgactggagcgaggcgatgttcggggattcccaatacgaggtcgccaacatcttcttctggaggccgtggttggcttgtatggagcagcagacgcgctacttcgagcggaggcatccggagcttgcaggatcgccgcggctccgggcgtatatgctccgcattggtcttgaccaactctatcagagcttggttgacggcaatttcgatgatgcagcttgggcgcagggtcgatgcgacgcaatcgtccgatccggagccgggactgtcgggcgtacacaaatcgcccgcagaagcgcggccgtctggaccgatggctgtgtagaagtactcgccgatagtggaaaccgacgccccagcactcgtccgagggcaaaggaatagtgaggtacagcttggatcgatccggctgctaacaaagcccgaaaggaagctgagttggctgctgccaccgctgagcaataactagcataaccccttggggcctctaaacgggtcttgaggggttttttgctgaaaggaggaactatatccggatgatcgggcgcgccgtcgacggatccgtacgagatccggccggccagatcctgcaggagatccaagcttttgatccatgcccttcatttgccgcttattaattaatttggtaacagtccgtactaatcagttacttatccttcccccatcataattaatcttggtagtctcgaatgccacaacactgactagtctcttggatcataagaaaaagccaaggaacaaaagaagacaaaacacaatgagagtatcctttgcatagcaatgtctaagttcataaaattcaaacaaaaacgcaatcacacacagtggacatcacttatccactagctgatcaggatcgccgcgtcaagaaaaaaaaactggaccccaaaagccatgcacaacaacacgtactcacaaaggtgtcaatcgagcagcccaaaacattcaccaactcaacccatcatgagccctcacatttgttgtttctaacccaacctcaaactcgtattctcttccgccacctcatttttgtttatttcaacacccgtcaaactgcatgccaccccgtggccaaatgtccatgcatgttaacaagacctatgactataaatagctgcaatctcggcccaggttttcatcatcaagaaccagttcaatatcctagtacaccgtattaaagaatttaagatatactgcggccgcaacatgactatcgactcacaatactacaagtcgcgagacaaaaacgacacggcacccaaaatcgcgggaatccgatatgccccgctatcgacaccattactcaaccgatgtgagaccttctctctggtctggcacattttcagcattcccactttcctcacaattttcatgctatgctgcgcaattccactgctctggccatttgtgattgcgtatgtagtgtacgctgttaaagacgactccccgtccaacggaggagtggtcaagcgatactcgcctatttcaagaaacttcttcatctggaagctctttggccgctacttccccataactctgcacaagacggtggatctggagcccacgcacacatactaccctctggacgtccaggagtatcacctgattgctgagagatactggccgcagaacaagtacctccgagcaatcatcaccaccatcgagtactttctgcccgccttcatgaaacggtctctttctatcaacgagcaggagcagcctgccgagcgagatcctctcctgtctcccgtttctcccagctctccgggttctcaacctgacaagtggattaaccacgacagcagatatagccgtggagaatcatctggctccaacggccacgcctcgggctccgaacttaacggcaacggcaacaacggcaccactaaccgacgacctttgtcgtccgcctctgctggctccactgcatctgattccacgcttcttaacgggtccctcaactcctacgccaaccagatcattggcgaaaacgacccacagctgtcgcccacaaaactcaagcccactggcagaaaatacatcttcggctaccacccccacggcattatcggcatgggagcctttggtggaattgccaccgagggagctggatggtccaagctctttccgggcatccctgtttctcttatgactctcaccaacaacttccgagtgcctctctacagagagtacctcatgagtctgggagtcgcttctgtctccaagaagtcctgcaaggccctcctcaagcgaaaccagtctatctgcattgtcgttggtggagcacaggaaagtcttctggccagacccggtgtcatggacctggtgctactcaagcgaaagggttttgttcgacttggtatggaggtcggaaatgtcgcccttgttcccatcatggcctttggtgagaacgacctctatgaccaggttagcaacgacaagtcgtccaagctgtaccgattccagcagtttgtcaagaacttccttggattcacccttcctttgatgcatgcccgaggcgtcttcaactacgatgtcggtcttgtcccctacaggcgacccgtcaacattgtggttggttcccccattgacttgccttatctcccacaccccaccgacgaagaagtgtccgaataccacgaccgatacatcgccgagctgcagcgaatctacaacgagcacaaggatgaatatttcatcgattggaccgaggagggcaaaggagccccagagttccgaatgattgagtaagc

SEQ ID NO: 99 - DNA, 8641 bp, Artificial Sequence
  plasmid pKR1277
ggccgcaagtatgaactaaaatgcatgtaggtgtaagagctcatggagagcatggaatattgtatccgaccatgtaacagtataataactgagctccatctcacttcttctatgaataaacaaaggatgttatgatatattaacactctatctatgcaccttattgttctatgataaatttcctcttattattataaatcatctgaatcgtgacggcttatggaatgcttcaaatagtacaaaaacaaatgtgtactataagactttctaaacaattctaaccttagcattgtgaacgagacataagtgttaagaagacataacaattataatggaagaagtttgtctccatttatatattatatattacccacttatgtattatattaggatgttaaggagacataacaattataaagagagaagtttgtatccatttatatattatatactacccatttatatattatacttatccacttatttaatgtctttataaggtttgatccatgatatttctaatattttagttgatatgtatatgaaagggtactatttgaactctcttactctgtataaaggttggatcatccttaaagtgggtctatttaattttattgcttcttacagataaaaaaaaaattatgagttggtttgataaaatattgaaggatttaaaataataataaataacatataatatatgtatataaatttattataatataacatttatctataaaaaagtaaatattgtcataaatctatacaatcgtttagccttgctggacgaatctcaattatttaaacgagagtaaacatatttgactttttggttatttaacaaattattatttaacactatatgaaatttttttttttatcagcaaagaataaaattaaattaagaaggacaatggtgtcccaatccttatacaaccaacttccacaagaaagtcaagtcagagacaacaaaaaaacaagcaaaggaaattttttaatttgagttgtcttgtttgctgcataatttatgcagtaaaacactacacataacccttttagcagtagagcaatggttgaccgtgtgcttagcttcttttattttatttttttatcagcaaagaataaataaaataaaatgagacacttcagggatgtttcaacaagcttggcgcgccgttctatagtgtcacctaaatcgtatgtgtatgatacataaggttatgtattaattgtagccgcgttctaacgacaatatgtccatatggtgcactctcagtacaatctgctctgatgccgcatagttaagccagccccgacacccgccaacacccgctgacgcgccctgacgggcttgtctgctcccggcatccgcttacagacaagctgtgaccgtctccgggagctgcatgtgtcagaggttttcaccgtcatcaccgaaacgcgcgagacgaaagggcctcgtgatacgcctatttttataggttaatgtcatgaccaaaatcccttaacgtgagttttcgttccactgagcgtcagaccccgtagaaaagatcaaaggatcttcttgagatcctttttttctgcgcgtaatctgctgcttgcaaacaaaaaaaccaccgctaccagcggtggtttgtttgccggatcaagagctaccaactctttttccgaaggtaactggcttcagcagagcgcagataccaaatactgtccttctagtgtagccgtagttaggccaccacttcaagaactctgtagcaccgcctacatacctcgctctgctaatcctgttaccagtggctgctgccagtggcgataagtcgtgtcttaccgggttggactcaagacgatagttaccggataaggcgcagcggtcgggctgaacggggggttcgtgcacacagcccagcttggagcgaacgacctacaccgaactgagatacctacagcgtgagcattgagaaagcgccacgcttcccgaagggagaaaggcggacaggtatccggtaagcggcagggtcggaacaggagagcgcacgagggagcttccagggggaaacgcctggtatctttatagtcctgtcgggtttcgccacctctgacttgagcgtcgatttttgtgatgctcgtcaggggggcggagcctatggaaaaacgccagcaacgcggcctttttacggttcctggccttttgctggccttttgctcacatgttctttcctgcgttatcccctgattctgtggataaccgtattaccgcctttgagtgagctgataccgctcgccgcagccgaacgaccgagcgcagcgagtcagtgagcgaggaagcggaagagcgcccaatacgcaaaccgcctctccccgcgcgttggccgattcattaatgcaggttgatcgattcgacatcgatctagtaacatagatgacaccgcgcgcgataatttatcctagtttgcgcgctatattttgttttctatcgcgtattaaatgtataattgcgggactctaatcataaaaacccatctcataaataacgtcatgcattacatgttaattattacatgcttaacgtaattcaacagaaattatatgataatcatcgcaagaccggcaacaggattcaatcttaagaaactttattgccaaatgtttgaacgatctgcttcgacgcactccttctttaggtacctcactattcctttgccctcggacgagtgctggggcgtcggtttccactatcggcgagtacttctacacagccatcggtccagacggccgcgcttctgcgggcgatttgtgtacgcccgacagtcccggctccggatcggacgattgcgtcgcatcgaccctgcgcccaagctgcatcatcgaaattgccgtcaaccaagctctgatagagttggtcaagaccaatgcggagcatatacgcccggagccgcggcgatcctgcaagctccggatgcctccgctcgaagtagcgcgtctgctgctccatacaagccaaccacggcctccagaagaagatgttggcgacctcgtattgggaatccccgaacatcgcctcgctccagtcaatgaccgctgttatgcggccattgtccgtcaggacattgttggagccgaaatccgcgtgcacgaggtgccggacttcggggcagtcctcggcccaaagcatcagctcatcgagagcctgcgcgacggacgcactgacggtgtcgtccatcacagtttgccagtgatacacatggggatcagcaatcgcgcatatgaaatcacgccatgtagtgtattgaccgattccttgcggtccgaatgggccgaacccgctcgtctggctaagatcggccgcagcgatcgcatccatggcctccgcgaccggctgcagaacagcgggcagttcggtttcaggcaggtcttgcaacgtgacaccctgtgcacggcgggagatgcaataggtcaggctctcgctgaattccccaatgtcaagcacttccggaatcgggagcgcggccgatgcaaagtgccgataaacataacgatctttgtagaaaccatcggcgcagctatttacccgcaggacatatccacgccctcctacatcgaagctgaaagcacgagattcttcgccctccgagagctgcatcaggtcggagacgctgtcgaacttttcgatcagaaacttctcgacagacgtcgcggtgagttcaggctttttcatggtttaataagaagagaaaagagttcttttgttatggctgaagtaatagagaaatgagctcgagcgtgtcctctccaaatgaaatgaacttccttatatagaggaagggtcttgcgaaggatagtgggattgtgcgtcatcccttacgtcagtggagatgtcacatcaatccacttgctttgaagacgtggttggaacgtcttctttttccacgatgctcctcgtgggtgggggtccatctttgggaccactgtcggcagaggcatcttgaatgatagcctttcctttatcgcaatgatggcatttgtaggagccaccttccttttctactgtcctttcgatgaagtgacagatagctgggcaatggaatccgaggaggtttcccgaaattatcctttgttgaaaagtctcaatagccctttggtcttctgagactgtatctttgacatttttggagtagaccagagtgtcgtgctccaccatgttgacgaagattttcttcttgtcattgagtcgtaaaagactctgtatgaactgttcgccagtcttcacggcgagttctgttagatcctcgatttgaatcttagactccatgcatggccttagattcagtaggaactacctttttagagactccaatctctattacttgccttggtttatgaagcaagccttgaatcgtccatactggaatagtacttctgatcttgagaaatatgtctttctctgtgttcttgatgcaattagtcctgaatcttttgactgcatctttaaccttcttgggaaggtatttgatctcctggagattgttactcgggtagatcgtcttgatgagacctgctgcgtaggcctctctaaccatctgtgggtcagcattctttctgaaattgaagaggctaaccttctcattatcagtggtgaacatagtgtcgtcaccttcaccttcgaacttccttcctagatcgtaaagatagaggaaatcgtccattgtaatctccggggcaaaggagatctcttttggggctggatcactgctgggccttttggttcctagcgtgagccagtgggctttttgctttggtgggcttgttagggccttagcaaagctcttgggcttgagttgagcttctcctttggggatgaagttcaacctgtctgtttgctgacttgttgtgtacgcgtcagctgctgctcttgcctctgtaatagtggcaaatttcttgtgtgcaactccgggaacgccgtttgttgccgcctttgtacaaccccagtcatcgtatataccggcatgtggaccgttatacacaacgtagtagttgatatgagggtgttgaatacccgattctgctctgagaggagcaactgtgctgttaagctcagatttttgtgggattggaattggatcgatctcgatcccgcgaaattaatacgactcactatagggagaccacaacggtttccctctagaaataattttgtttaactttaagaaggagatatacccatggaaaagcctgaactcaccgcgacgtctgtcgagaagtttctgatcgaaaagttcgacagcgtctccgacctgatgcagctctcggagggcgaagaatctcgtgctttcagcttcgatgtaggagggcgtggatatgtcctgcgggtaaatagctgcgccgatggtttctacaaagatcgttatgtttatcggcactttgcatcggccgcgctcccgattccggaagtgcttgacattggggaattcagcgagagcctgacctattgcatctcccgccgtgcacagggtgtcacgttgcaagacctgcctgaaaccgaactgcccgctgttctgcagccggtcgcggaggctatggatgcgatcgctgcggccgatcttagccagacgagcgggttcggcccattcggaccgcaaggaatcggtcaatacactacatggcgtgatttcatatgcgcgattgctgatccccatgtgtatcactggcaaactgtgatggacgacaccgtcagtgcgtccgtcgcgcaggctctcgatgagctgatgctttgggccgaggactgccccgaagtccggcacctcgtgcacgcggatttcggctccaacaatgtcctgacggacaatggccgcataacagcggtcattgactggagcgaggcgatgttcggggattcccaatacgaggtcgccaacatcttcttctggaggccgtggttggcttgtatggagcagcagacgcgctacttcgagcggaggcatccggagcttgcaggatcgccgcggctccgggcgtatatgctccgcattggtcttgaccaactctatcagagcttggttgacggcaatttcgatgatgcagcttgggcgcagggtcgatgcgacgcaatcgtccgatccggagccgggactgtcgggcgtacacaaatcgcccgcagaagcgcggccgtctggaccgatggctgtgtagaagtactcgccgatagtggaaaccgacgccccagcactcgtccgagggcaaaggaatagtgaggtacagcttggatcgatccggctgctaacaaagcccgaaaggaagctgagttggctgctgccaccgctgagcaataactagcataaccccttggggcctctaaacgggtcttgaggggttttttgctgaaaggaggaactatatccggatgatcgggcgcgccgtcgacggatccgtacgagatccggccggccagatcctgcaggagatccaagcttttgatccatgcccttcatttgccgcttattaattaatttggtaacagtccgtactaatcagttacttatccttcccccatcataattaatcttggtagtctcgaatgccacaacactgactagtctcttggatcataagaaaaagccaaggaacaaaagaagacaaaacacaatgagagtatcctttgcatagcaatgtctaagttcataaaattcaaacaaaaacgcaatcacacacagtggacatcacttatccactagctgatcaggatcgccgcgtcaagaaaaaaaaactggaccccaaaagccatgcacaacaacacgtactcacaaaggtgtcaatcgagcagcccaaaacattcaccaactcaacccatcatgagccctcacatttgttgtttctaacccaacctcaaactcgtattctcttccgccacctcatttttgtttatttcaacacccgtcaaactgcatgccaccccgtggccaaatgtccatgcatgttaacaagacctatgactataaatagctgcaatctcggcccaggttttcatcatcaagaaccagttcaatatcctagtacaccgtattaaagaatttaagatatactgcggccgcaacatgactatcgactcacaatactacaagtcgcgagacaaaaacgacacggcacccaaaatcgcgggaatccgatatgccccgctatcgacaccattactcaaccgatgtgagaccttctctctggtctggcacattttcagcattcccactttcctcacaattttcatgctatgctgcgcaattccactgctctggccatttgtgattgcgtatgtagtgtacgctgttaaagacgactccccgtccaacggaggagtggtcaagcgatactcgcctatttcaagaaacttcttcatctggaagctctttggccgctacttccccataactctgcacaagacggtggatctggagcccacgcacacatactaccctctggacgtccaggagtatcacctgattgctgagagatactggccgcagaacaagtacctccgagcaatcatcaccaccatcgagtactttctgcccgccttcatgaaacggtctctttctatcaacgagcaggagcagcctgccgagcgagatcctctcctgtctcccgtttctcccagctctccgggttctcaacctgacaagtggattaaccacgacagcagatatagccgtggagaatcatctggctccaacggccacgcctcgggctccgaacttaacggcaacggcaacaacggcaccactaaccgacgacctttgtcgtccgcctctgctggctccactgcatctgattccacgcttcttaacgggtccctcaactcctacgccaaccagatcattggcgaaaacgacccacagctgtcgcccacaaaactcaagcccactggcagaaaatacatcttcggctaccacccccacggcattatcggcatgggagcctttggtggaattgccaccgagggagctggatggtccaagctctttccgggcatccctgtttctcttatgactctcaccaacaacttccgagtgcctctcttcagagagtacctcatgagtctgggagtcgcttctgtctccaagaagtcctgcaaggccctcctcaagcgaaaccagtctatctgcattgtcgttggtggagcacaggaaagtcttctggccagacccggtgtcatggacctggtgctactcaagcgaaagggttttgttcgacttggtatggaggtcggaaatgtcgcccttgttcccatcatggcctttggtgagaacgacctctatgaccaggttagcaacgacaagtcgtccaagctgtaccgattccagcagtttgtcaagaacttccttggattcacccttcctttgatgcatgcccgaggcgtcttcaactacgatgtcggtcttgtcccctacaggcgacccgtcaacattgtggttggttcccccattgacttgccttatctcccacaccccaccgacgaagaagtgtccgaataccacgaccgatacatcgccgagctgcagcgaatctacaacgagcacaaggatgaatatttcatcgattggaccgaggagggcaaaggagccccagagttccgaatgattgagtaagc

SEQ ID NO: 100 - DNA, 8641 bp, Artificial Sequence
  plasmid pKR1278
ggccgcaagtatgaactaaaatgcatgtaggtgtaagagctcatggagagcatggaatattgtatccgaccatgtaacagtataataactgagctccatctcacttcttctatgaataaacaaaggatgttatgatatattaacactctatctatgcaccttattgttctatgataaatttcctcttattattataaatcatctgaatcgtgacggcttatggaatgcttcaaatagtacaaaaacaaatgtgtactataagactttctaaacaattctaaccttagcattgtgaacgagacataagtgttaagaagacataacaattataatggaagaagtttgtctccatttatatattatatattacccacttatgtattatattaggatgttaaggagacataacaattataaagagagaagtttgtatccatttatatattatatactacccatttatatattatacttatccacttatttaatgtctttataaggtttgatccatgatatttctaatattttagttgatatgtatatgaaagggtactatttgaactctcttactctgtataaaggttggatcatccttaaagtgggtctatttaattttattgcttcttacagataaaaaaaaaattatgagttggtttgataaaatattgaaggatttaaaataataataaataacatataatatatgtatataaatttattataatataacatttatctataaaaaagtaaatattgtcataaatctatacaatcgtttagccttgctggacgaatctcaattatttaaacgagagtaaacatatttgactttttggttatttaacaaattattatttaacactatatgaaatttttttttttatcagcaaagaataaaattaaattaagaaggacaatggtgtcccaatccttatacaaccaacttccacaagaaagtcaagtcagagacaacaaaaaaacaagcaaaggaaattttttaatttgagttgtcttgtttgctgcataatttatgcagtaaaacactacacataacccttttagcagtagagcaatggttgaccgtgtgcttagcttcttttattttatttttttatcagcaaagaataaataaaataaaatgagacacttcagggatgtttcaacaagcttggcgcgccgttctatagtgtcacctaaatcgtatgtgtatgatacataaggttatgtattaattgtagccgcgttctaacgacaatatgtccatatggtgcactctcagtacaatctgctctgatgccgcatagttaagccagccccgacacccgccaacacccgctgacgcgccctgacgggcttgtctgctcccggcatccgcttacagacaagctgtgaccgtctccgggagctgcatgtgtcagaggttttcaccgtcatcaccgaaacgcgcgagacgaaagggcctcgtgatacgcctatttttataggttaatgtcatgaccaaaatcccttaacgtgagttttcgttccactgagcgtcagaccccgtagaaaagatcaaaggatcttcttgagatcctttttttctgcgcgtaatctgctgcttgcaaacaaaaaaaccaccgctaccagcggtggtttgtttgccggatcaagagctaccaactctttttccgaaggtaactggcttcagcagagcgcagataccaaatactgtccttctagtgtagccgtagttaggccaccacttcaagaactctgtagcaccgcctacatacctcgctctgctaatcctgttaccagtggctgctgccagtggcgataagtcgtgtcttaccgggttggactcaagacgatagttaccggataaggcgcagcggtcgggctgaacggggggttcgtgcacacagcccagcttggagcgaacgacctacaccgaactgagatacctacagcgtgagcattgagaaagcgccacgcttcccgaagggagaaaggcggacaggtatccggtaagcggcagggtcggaacaggagagcgcacgagggagcttccagggggaaacgcctggtatctttatagtcctgtcgggtttcgccacctctgacttgagcgtcgatttttgtgatgctcgtcaggggggcggagcctatggaaaaacgccagcaacgcggcctttttacggttcctggccttttgctggccttttgctcacatgttctttcctgcgttatcccctgattctgtggataaccgtattaccgcctttgagtgagctgataccgctcgccgcagccgaacgaccgagcgcagcgagtcagtgagcgaggaagcggaagagcgcccaatacgcaaaccgcctctccccgcgcgttggccgattcattaatgcaggttgatcgattcgacatcgatctagtaacatagatgacaccgcgcgcgataatttatcctagtttgcgcgctatattttgttttctatcgcgtattaaatgtataattgcgggactctaatcataaaaacccatctcataaataacgtcatgcattacatgttaattattacatgcttaacgtaattcaacagaaattatatgataatcatcgcaagaccggcaacaggattcaatcttaagaaactttattgccaaatgtttgaacgatctgcttcgacgcactccttctttaggtacctcactattcctttgccctcggacgagtgctggggcgtcggtttccactatcggcgagtacttctacacagccatcggtccagacggccgcgcttctgcgggcgatttgtgtacgcccgacagtcccggctccggatcggacgattgcgtcgcatcgaccctgcgcccaagctgcatcatcgaaattgccgtcaaccaagctctgatagagttggtcaagaccaatgcggagcatatacgcccggagccgcggcgatcctgcaagctccggatgcctccgctcgaagtagcgcgtctgctgctccatacaagccaaccacggcctccagaagaagatgttggcgacctcgtattgggaatccccgaacatcgcctcgctccagtcaatgaccgctgttatgcggccattgtccgtcaggacattgttggagccgaaatccgcgtgcacgaggtgccggacttcggggcagtcctcggcccaaagcatcagctcatcgagagcctgcgcgacggacgcactgacggtgtcgtccatcacagtttgccagtgatacacatggggatcagcaatcgcgcatatgaaatcacgccatgtagtgtattgaccgattccttgcggtccgaatgggccgaacccgctcgtctggctaagatcggccgcagcgatcgcatccatggcctccgcgaccggctgcagaacagcgggcagttcggtttcaggcaggtcttgcaacgtgacaccctgtgcacggcgggagatgcaataggtcaggctctcgctgaattccccaatgtcaagcacttccggaatcgggagcgcggccgatgcaaagtgccgataaacataacgatctttgtagaaaccatcggcgcagctatttacccgcaggacatatccacgccctcctacatcgaagctgaaagcacgagattcttcgccctccgagagctgcatcaggtcggagacgctgtcgaacttttcgatcagaaacttctcgacagacgtcgcggtgagttcaggctttttcatggtttaataagaagagaaaagagttcttttgttatggctgaagtaatagagaaatgagctcgagcgtgtcctctccaaatgaaatgaacttccttatatagaggaagggtcttgcgaaggatagtgggattgtgcgtcatcccttacgtcagtggagatgtcacatcaatccacttgctttgaagacgtggttggaacgtcttctttttccacgatgctcctcgtgggtgggggtccatctttgggaccactgtcggcagaggcatcttgaatgatagcctttcctttatcgcaatgatggcatttgtaggagccaccttccttttctactgtcctttcgatgaagtgacagatagctgggcaatggaatccgaggaggtttcccgaaattatcctttgttgaaaagtctcaatagccctttggtcttctgagactgtatctttgacatttttggagtagaccagagtgtcgtgctccaccatgttgacgaagattttcttcttgtcattgagtcgtaaaagactctgtatgaactgttcgccagtcttcacggcgagttctgttagatcctcgatttgaatcttagactccatgcatggccttagattcagtaggaactacctttttagagactccaatctctattacttgccttggtttatgaagcaagccttgaatcgtccatactggaatagtacttctgatcttgagaaatatgtctttctctgtgttcttgatgcaattagtcctgaatcttttgactgcatctttaaccttcttgggaaggtatttgatctcctggagattgttactcgggtagatcgtcttgatgagacctgctgcgtaggcctctctaaccatctgtgggtcagcattctttctgaaattgaagaggctaaccttctcattatcagtggtgaacatagtgtcgtcaccttcaccttcgaacttccttcctagatcgtaaagatagaggaaatcgtccattgtaatctccggggcaaaggagatctcttttggggctggatcactgctgggccttttggttcctagcgtgagccagtgggctttttgctttggtgggcttgttagggccttagcaaagctcttgggcttgagttgagcttctcctttggggatgaagttcaacctgtctgtttgctgacttgttgtgtacgcgtcagctgctgctcttgcctctgtaatagtggcaaatttcttgtgtgcaactccgggaacgccgtttgttgccgcctttgtacaaccccagtcatcgtatataccggcatgtggaccgttatacacaacgtagtagttgatatgagggtgttgaatacccgattctgctctgagaggagcaactgtgctgttaagctcagatttttgtgggattggaattggatcgatctcgatcccgcgaaattaatacgactcactatagggagaccacaacggtttccctctagaaataattttgtttaactttaagaaggagatatacccatggaaaagcctgaactcaccgcgacgtctgtcgagaagtttctgatcgaaaagttcgacagcgtctccgacctgatgcagctctcggagggcgaagaatctcgtgctttcagcttcgatgtaggagggcgtggatatgtcctgcgggtaaatagctgcgccgatggtttctacaaagatcgttatgtttatcggcactttgcatcggccgcgctcccgattccggaagtgcttgacattggggaattcagcgagagcctgacctattgcatctcccgccgtgcacagggtgtcacgttgcaagacctgcctgaaaccgaactgcccgctgttctgcagccggtcgcggaggctatggatgcgatcgctgcggccgatcttagccagacgagcgggttcggcccattcggaccgcaaggaatcggtcaatacactacatggcgtgatttcatatgcgcgattgctgatccccatgtgtatcactggcaaactgtgatggacgacaccgtcagtgcgtccgtcgcgcaggctctcgatgagctgatgctttgggccgaggactgccccgaagtccggcacctcgtgcacgcggatttcggctccaacaatgtcctgacggacaatggccgcataacagcggtcattgactggagcgaggcgatgttcggggattcccaatacgaggtcgccaacatcttcttctggaggccgtggttggcttgtatggagcagcagacgcgctacttcgagcggaggcatccggagcttgcaggatcgccgcggctccgggcgtatatgctccgcattggtcttgaccaactctatcagagcttggttgacggcaatttcgatgatgcagcttgggcgcagggtcgatgcgacgcaatcgtccgatccggagccgggactgtcgggcgtacacaaatcgcccgcagaagcgcggccgtctggaccgatggctgtgtagaagtactcgccgatagtggaaaccgacgccccagcactcgtccgagggcaaaggaatagtgaggtacagcttggatcgatccggctgctaacaaagcccgaaaggaagctgagttggctgctgccaccgctgagcaataactagcataaccccttggggcctctaaacgggtcttgaggggttttttgctgaaaggaggaactatatccggatgatcgggcgcgccgtcgacggatccgtacgagatccggccggccagatcctgcaggagatccaagcttttgatccatgcccttcatttgccgcttattaattaatttggtaacagtccgtactaatcagttacttatccttcccccatcataattaatcttggtagtctcgaatgccacaacactgactagtctcttggatcataagaaaaagccaaggaacaaaagaagacaaaacacaatgagagtatcctttgcatagcaatgtctaagttcataaaattcaaacaaaaacgcaatcacacacagtggacatcacttatccactagctgatcaggatcgccgcgtcaagaaaaaaaaactggaccccaaaagccatgcacaacaacacgtactcacaaaggtgtcaatcgagcagcccaaaacattcaccaactcaacccatcatgagccctcacatttgttgtttctaacccaacctcaaactcgtattctcttccgccacctcatttttgtttatttcaacacccgtcaaactgcatgccaccccgtggccaaatgtccatgcatgttaacaagacctatgactataaatagctgcaatctcggcccaggttttcatcatcaagaaccagttcaatatcctagtacaccgtattaaagaatttaagatatactgcggccgcaacatgactatcgactcacaatactacaagtcgcgagacaaaaacgacacggcacccaaaatcgcgggaatccgatatgccccgctatcgacaccattactcaaccgatgtgagaccttctctctggtctggcacattttcagcattcccactttcctcacaattttcatgctatgctgcgcaattccactgctctggccatttgtgattgcgtatgtagtgtacgctgttaaagacgactccccgtccaacggaggagtggtcaagcgatactcgcctatttcaagaaacttcttcatctggaagctctttggccgctacttccccataactctgcacaagacggtggatctggagcccacgcacacatactaccctctggacgtccaggagtatcacctgattgctgagagatactggccgcagaacaagtacctccgagcaatcatcaccaccatcgagtactttctgcccgccttcatgaaacggtctctttctatcaacgagcaggagcagcctgccgagcgagatcctctcctgtctcccgtttctcccagctctccgggttctcaacctgacaagtggattaaccacgacagcagatatagccgtggagaatcatctggctccaacggccacgcctcgggctccgaacttaacggcaacggcaacaacggcaccactaaccgacgacctttgtcgtccgcctctgctggctccactgcatctgattccacgcttcttaacgggtccctcaactcctacgccaaccagatcattggcgaaaacgacccacagctgtcgcccacaaaactcaagcccactggcagaaaatacatcttcggctaccacccccacggcattatcggcatgggagcctttggtggaattgccaccgagggagctggatggtccaagctctttccgggcatccctgtttctcttatgactctcaccaacaacttccgagtgcctctcctcagagagtacctcatgagtctgggagtcgcttctgtctccaagaagtcctgcaaggccctcctcaagcgaaaccagtctatctgcattgtcgttggtggagcacaggaaagtcttctggccagacccggtgtcatggacctggtgctactcaagcgaaagggttttgttcgacttggtatggaggtcggaaatgtcgcccttgttcccatcatggcctttggtgagaacgacctctatgaccaggttagcaacgacaagtcgtccaagctgtaccgattccagcagtttgtcaagaacttccttggattcacccttcctttgatgcatgcccgaggcgtcttcaactacgatgtcggtcttgtcccctacaggcgacccgtcaacattgtggttggttcccccattgacttgccttatctcccacaccccaccgacgaagaagtgtccgaataccacgaccgatacatcgccgagctgcagcgaatctacaacgagcacaaggatgaatatttcatcgattggaccgaggagggcaaaggagccccagagttccgaatgattgagtaagc

SEQ ID NO: 101 - DNA, 11647 bp, Artificial Sequence
  plasmid pKS392
  misc_feature (2349)..(2349): n is a, c, g, or t
ggccgcaagtatgaactaaaatgcatgtaggtgtaagagctcatggagagcatggaatattgtatccgaccatgtaacagtataataactgagctccatctcacttcttctatgaataaacaaaggatgttatgatatattaacactctatctatgcaccttattgttctatgataaatttcctcttattattataaatcatctgaatcgtgacggcttatggaatgcttcaaatagtacaaaaacaaatgtgtactataagactttctaaacaattctaaccttagcattgtgaacgagacataagtgttaagaagacataacaattataatggaagaagtttgtctccatttatatattatatattacccacttatgtattatattaggatgttaaggagacataacaattataaagagagaagtttgtatccatttatatattatatactacccatttatatattatacttatccacttatttaatgtctttataaggtttgatccatgatatttctaatattttagttgatatgtatatgaaagggtactatttgaactctcttactctgtataaaggttggatcatccttaaagtgggtctatttaattttattgcttcttacagataaaaaaaaaattatgagttggtttgataaaatattgaaggatttaaaataataataaataacatataatatatgtatataaatttattataatataacatttatctataaaaaagtaaatattgtcataaatctatacaatcgtttagccttgctggacgaatctcaattatttaaacgagagtaaacatatttgactttttggttatttaacaaattattatttaacactatatgaaatttttttttttatcagcaaagaataaaattaaattaagaaggacaatggtgtcccaatccttatacaaccaacttccacaagaaagtcaagtcagagacaacaaaaaaacaagcaaaggaaattttttaatttgagttgtcttgtttgctgcataatttatgcagtaaaacactacacataacccttttagcagtagagcaatggttgaccgtgtgcttagcttcttttattttatttttttatcagcaaagaataaataaaataaaatgagacacttcagggatgtttcaacaagcttggatcctcgaagagaagggttaataacacacttttttaacatttttaacacaaattttagttatttaaaaatttattaaaaaatttaaaataagaagaggaactctttaaataaatctaacttacaaaatttatgatttttaataagttttcaccaataaaaaatgtcataaaaatatgttaaaaagtatattatcaatattctctttatgataaataaaaagaaaaaaaaaataaaagttaagtgaaaatgagattgaagtgactttaggtgtgtataaatatatcaaccccgccaacaatttatttaatccaaatatattgaagtatattattccatagcctttatttatttatatatttattatataaaagctttatttgttctaggttgttcatgaaatatttttttggttttatctccgttgtaagaaaatcatgtgctttgtgtcgccactcactattgcagctttttcatgcattggtcagattgacggttgattgtatttttgttttttatggttttgtgttatgacttaagtcttcatctctttatctcttcatcaggtttgatggttacctaatatggtccatgggtacatgcatggttaaattaggtggccaactttgttgtgaacgatagaattttttttatattaagtaaactatttttatattatgaaataataataaaaaaaatattttatcattattaacaaaatcatattagttaatttgttaactctataataaaagaaatactgtaacattcacattacatggtaacatctttccaccctttcatttgttttttgtttgatgactttttttcttgtttaaatttatttcccttcttttaaatttggaatacattatcatcatatataaactaaaatactaaaaacaggattacacaaatgataaataataacacaaatatttataaatctagctgcaatatatttaaactagctatatcgatattgtaaaataaaactagctgcattgatactgataaaaaaatatcatgtgctttctggactgatgatgcagtatacttttgacattgcctttattttatttttcagaaaagctttcttagttctgggttcttcattatttgtttcccatctccattgtgaattgaatcatttgcttcgtgtcacaaatacaatttagntaggtacatgcattggtcagattcacggtttattatgtcatgacttaagttcatggtagtacattacctgccacgcatgcattatattggttagatttgataggcaaatttggttgtcaacaatataaatataaataatgtttttatattacgaaataacagtgatcaaaacaaacagttttatctttattaacaagattttgtttttgtttgatgacgttttttaatgtttacgctttcccccttcttttgaatttagaacactttatcatcataaaatcaaatactaaaaaaattacatatttcataaataataacacaaatatttttaaaaaatctgaaataataatgaacaatattacatattatcacgaaaattcattaataaaaatattatataaataaaatgtaatagtagttatatgtaggaaaaaagtactgcacgcataatatatacaaaaagattaaaatgaactattataaataataacactaaattaatggtgaatcatatcaaaataatgaaaaagtaaataaaatttgtaattaacttctatatgtattacacacacaaataataaataatagtaaaaaaaattatgataaatatttaccatctcataagatatttaaaataatgataaaaatatagattattttttatgcaactagctagccaaaaagagaacacgggtatatataaaaagagtacctttaaattctactgtacttcctttattcctgacgtttttatatcaagtggacatacgtgaagattttaattatcagtctaaatatttcattagcacttaatacttttctgttttattcctatcctataagtagtcccgattctcccaacattgcttattcacacaactaactaagaaagtcttccatagccccccaagcggcccatggcctcctccgaggacgtcatcaaggagttcatgcgcttcaaggtgcgcatggagggctccgtgaacggccacgagttcgagatcgagggcgagggcgagggccgcccctacgagggcacccagaccgccaagctgaaggtgaccaagggcggccccctgcccttcgcctgggacatcctgtccccccagttccagtacggctccaaggtgtacgtgaagcaccccgccgacatccccgactacaagaagctgtccttccccgagggcttcaagtgggagcgcgtgatgaacttcgaggacggcggcgtggtgaccgtgacccaggactcctccctgcaggacggctccttcatctacaaggtgaagttcatcggcgtgaacttcccctccgacggccccgtaatgcagaagaagactatgggctgggaggcctccaccgagcgcctgtacccccgcgacggcgtgctgaagggcgagatccacaaggccctgaagctgaaggacggcggccactacctggtggagttcaagtccatctacatggccaagaagcccgtgcagctgcccggctactactacgtggactccaagctggacatcacctcccacaacgaggactacaccatcgtggagcagtacgagcgcgccgagggccgccaccacctgttcctgtagcggccggccgcgacacaagtgtgagagtactaaataaatgctttggttgtacgaaatcattacactaaataaaataatcaaagcttatatatgccttccgctaaggccgaatgcaaagaaattggttctttctcgttatcttttgccacttttactagtacgtattaattactacttaatcatctttgtttacggctcattatatccgtcgacggcgcgccgctctagaactagtggatccgtcgacggcgcgcccgatcatccggatatagttcctcctttcagcaaaaaacccctcaagacccgtttagaggccccaaggggttatgctagttattgctcagcggtggcagcagccaactcagcttcctttcgggctttgttagcagccggatcgatccaagctgtacctcactattcctttgccctcggacgagtgctggggcgtcggtttccactatcggcgagtacttctacacagccatcggtccagacggccgcgcttctgcgggcgatttgtgtacgcccgacagtcccggctccggatcggacgattgcgtcgcatcgaccctgcgcccaagctgcatcatcgaaattgccgtcaaccaagctctgatagagttggtcaagaccaatgcggagcatatacgcccggagccgcggcgatcctgcaagctccggatgcctccgctcgaagtagcgcgtctgctgctccatacaagccaaccacggcctccagaagaagatgttggcgacctcgtattgggaatccccgaacatcgcctcgctccagtcaatgaccgctgttatgcggccattgtccgtcaggacattgttggagccgaaatccgcgtgcacgaggtgccggacttcggggcagtcctcggcccaaagcatcagctcatcgagagcctgcgcgacggacgcactgacggtgtcgtccatcacagtttgccagtgatacacatggggatcagcaatcgcgcatatgaaatcacgccatgtagtgtattgaccgattccttgcggtccgaatgggccgaacccgctcgtctggctaagatcggccgcagcgatcgcatccatagcctccgcgaccggctgcagaacagcgggcagttcggtttcaggcaggtcttgcaacgtgacaccctgtgcacggcgggagatgcaataggtcaggctctcgctgaattccccaatgtcaagcacttccggaatcgggagcgcggccgatgcaaagtgccgataaacataacgatctttgtagaaaccatcggcgcagctatttacccgcaggacatatccacgccctcctacatcgaagctgaaagcacgagattcttcgccctccgagagctgcatcaggtcggagacgctgtcgaacttttcgatcagaaacttctcgacagacgtcgcggtgagttcaggcttttccatgggtatatctccttcttaaagttaaacaaaattatttctagagggaaaccgttgtggtctccctatagtgagtcgtattaatttcgcgggatcgagatcgatccaattccaatcccacaaaaatctgagcttaacagcacagttgctcctctcagagcagaatcgggtattcaacaccctcatatcaactactacgttgtgtataacggtccacatgccggtatatacgatgactggggttgtacaaaggcggcaacaaacggcgttcccggagttgcacacaagaaatttgccactattacagaggcaagagcagcagctgacgcgtacacaacaagtcagcaaacagacaggttgaacttcatccccaaaggagaagctcaactcaagcccaagagctttgctaaggccctaacaagcccaccaaagcaaaaagcccactggctcacgctaggaaccaaaaggcccagcagtgatccagccccaaaagagatctcctttgccccggagattacaatggacgatttcctctatctttacgatctaggaaggaagttcgaaggtgaaggtgacgacactatgttcaccactgataatgagaaggttagcctcttcaatttcagaaagaatgctgacccacagatggttagagaggcctacgcagcaggtctcatcaagacgatctacccgagtaacaatctccaggagatcaaataccttcccaagaaggttaaagatgcagtcaaaagattcaggactaattgcatcaagaacacagagaaagacatatttctcaagatcagaagtactattccagtatggacgattcaaggcttgcttcataaaccaaggcaagtaatagagattggagtctctaaaaaggtagttcctactgaatctaaggccatgcatggagtctaagattcaaatcgaggatctaacagaactcgccgtgaagactggcgaacagttcatacagagtcttttacgactcaatgacaagaagaaaatcttcgtcaacatggtggagcacgacactctggtctactccaaaaatgtcaaagatacagtctcagaagaccaaagggctattgagacttttcaacaaaggataatttcgggaaacctcctcggattccattgcccagctatctgtcacttcatcgaaaggacagtagaaaaggaaggtggctcctacaaatgccatcattgcgataaaggaaaggctatcattcaagatgcctctgccgacagtggtcccaaagatggacccccacccacgaggagcatcgtggaaaaagaagacgttccaaccacgtcttcaaagcaagtggattgatgtgacatctccactgacgtaagggatgacgcacaatcccactatccttcgcaagacccttcctctatataaggaagttcatttcatttggagaggacacgctcgagctcatttctctattacttcagccataacaaaagaactcttttctcttcttattaaaccatgaaaaagcctgaactcaccgcgacgtctgtcgagaagtttctgatcgaaaagttcgacagcgtctccgacctgatgcagctctcggagggcgaagaatctcgtgctttcagcttcgatgtaggagggcgtggatatgtcctgcgggtaaatagctgcgccgatggtttctacaaagatcgttatgtttatcggcactttgcatcggccgcgctcccgattccggaagtgcttgacattggggaattcagcgagagcctgacctattgcatctcccgccgtgcacagggtgtcacgttgcaagacctgcctgaaaccgaactgcccgctgttctgcagccggtcgcggaggccatggatgcgatcgctgcggccgatcttagccagacgagcgggttcggcccattcggaccgcaaggaatcggtcaatacactacatggcgtgatttcatatgcgcgattgctgatccccatgtgtatcactggcaaactgtgatggacgacaccgtcagtgcgtccgtcgcgcaggctctcgatgagctgatgctttgggccgaggactgccccgaagtccggcacctcgtgcacgcggatttcggctccaacaatgtcctgacggacaatggccgcataacagcggtcattgactggagcgaggcgatgttcggggattcccaatacgaggtcgccaacatcttcttctggaggccgtggttggcttgtatggagcagcagacgcgctacttcgagcggaggcatccggagcttgcaggatcgccgcggctccgggcgtatatgctccgcattggtcttgaccaactctatcagagcttggttgacggcaatttcgatgatgcagcttgggcgcagggtcgatgcgacgcaatcgtccgatccggagccgggactgtcgggcgtacacaaatcgcccgcagaagcgcggccgtctggaccgatggctgtgtagaagtactcgccgatagtggaaaccgacgccccagcactcgtccgagggcaaaggaatagtgaggtacctaaagaaggagtgcgtcgaagcagatcgttcaaacatttggcaataaagtttcttaagattgaatcctgttgccggtcttgcgatgattatcatataatttctgttgaattacgttaagcatgtaataattaacatgtaatgcatgacgttatttatgagatgggtttttatgattagagtcccgcaattatacatttaatacgcgatagaaaacaaaatatagcgcgcaaactaggataaattatcgcgcgcggtgtcatctatgttactagatcgatgtcgaatctgatcaacctgcattaatgaatcggccaacgcgcggggagaggcggtttgcgtattgggcgctcttccgcttcctcgctcactgactcgctgcgctcggtcgttcggctgcggcgagcggtatcagctcactcaaaggcggtaatacggttatccacagaatcaggggataacgcaggaaagaacatgtgagcaaaaggccagcaaaaggccaggaaccgtaaaaaggccgcgttgctggcgtttttccataggctccgcccccctgacgagcatcacaaaaatcgacgctcaagtcagaggtggcgaaacccgacaggactataaagataccaggcgtttccccctggaagctccctcgtgcgctctcctgttccgaccctgccgcttaccggatacctgtccgcctttctcccttcgggaagcgtggcgctttctcaatgctcacgctgtaggtatctcagttcggtgtaggtcgttcgctccaagctgggctgtgtgcacgaaccccccgttcagcccgaccgctgcgccttatccggtaactatcgtcttgagtccaacccggtaagacacgacttatcgccactggcagcagccactggtaacaggattagcagagcgaggtatgtaggcggtgctacagagttcttgaagtggtggcctaactacggctacactagaaggacagtatttggtatctgcgctctgctgaagccagttaccttcggaaaaagagttggtagctcttgatccggcaaacaaaccaccgctggtagcggtggtttttttgtttgcaagcagcagattacgcgcagaaaaaaaggatctcaagaagatcctttgatcttttctacggggtctgacgctcagtggaacgaaaactcacgttaagggattttggtcatgacattaacctataaaaataggcgtatcacgaggccctttcgtctcgcgcgtttcggtgatgacggtgaaaacctctgacacatgcagctcccggagacggtcacagcttgtctgtaagcggatgccgggagcagacaagcccgtcagggcgcgtcagcgggtgttggcgggtgtcggggctggcttaactatgcggcatcagagcagattgtactgagagtgcaccatatggacatattgtcgttagaacgcggctacaattaatacataaccttatgtatcatacacatacgatttaggtgacactatagaacggcgcgccaagcttttgatccatgcccttcatttgccgcttattaattaatttggtaacagtccgtactaatcagttacttatccttcccccatcataattaatcttggtagtctcgaatgccacaacactgactagtctcttggatcataagaaaaagccaaggaacaaaagaagacaaaacacaatgagagtatcctttgcatagcaatgtctaagttcataaaattcaaacaaaaacgcaatcacacacagtggacatcacttatccactagctgatcaggatcgccgcgtcaagaaaaaaaaactggaccccaaaagccatgcacaacaacacgtactcacaaaggtgtcaatcgagcagcccaaaacattcaccaactcaacccatcatgagccctcacatttgttgtttctaacccaacctcaaactcgtattctcttccgccacctcatttttgtttatttcaacacccgtcaaactgcatgccaccccgtggccaaatgtccatgcatgttaacaagacctatgactataaatagctgcaatctcggcccaggttttcatcatcaagaaccagttcaatatcctagtacaccgtattaaagaatttaagatatactgcggccgcatggaggtgcgcagacgcaagattgacgttctcaaggcccagaagaatggttacgagtccggcccaccatctagacagtcctctcagccatcctctagagcctcctccagaacacgcaacaagcactcctcctccacactttccctttccggcctcaccatgaaggtgcagaagaagccagctggtccaccagccaactccaagaccccattcctccacatcaagccagtgcacacttgctgctccacctcaatgctctccagagactacgacggctccaacccatccttcaagggcttcaagaacatcggcatgatcatcctcatcgtgggcaatcttcgcctcgccttcgagaactacctcaagtacggcatctccaaccccttcttcgaccccaagatcacaccctccgagtggcagctttctggacttctcatcgttgtggcttacgctcacatcctcatggcttacgctatcgagtccgctgccaagctcctcttcctctcctccaagcaccactacatggccgttggtctcctccacaccatgaacaccctctcctccatttccctcctctcctacgtggtgtactactacctccccaatccagtggctggcactatcgttgagttcgtggccgtgatcctttctctcaagctcgcttcctacgcccttaccaactccgatctcagaaaggctgccattcacgcccagaagctcgacaagacacaggacgacaacgagaaggagtccacctcctcttcctcttcctctgacgacgccgagacacttgccgacatcgacgttatcccagcttactacgctcagcttccctacccacagaacgttaccctctccaacctcctctacttctggttcgctcccacccttgtgtaccagcccgtttacccaaagacagagagaatccgccccaagcatgtgatccgcaacctcttcgagcttgtgtctctctgcatgctcatccagttcctcatcttccagtacgcctaccccatcatgcagtcttgccttgccctcttcttccagccaaagctcgactacgccaacatttccgagcgcctcatgaagctcgcctctgtgtccatgatggtgtggctcatcggtttctacgccttcttccagaacggtctcaacctcatcgccgagctcacctgcttcggtaaccgcacattctaccagcagtggtggaactccagatctattggccagtactggacactctggaacaagcccgtgaaccagtacttccgccatcacgtttacgttcctcttctcgctaggggcatgtccagattcaacgcctctgttgtggtgttcttcttctccgctgtgattcacgagctccttgtgggcattcccacacacaacatcatcggcgctgccttcttcggaatgatgtcccaggtgccacttatcatggccaccgagaaccttcagcacatcaactcctcccttggcccattccttggtaactgcgctttctggttcaccttcttccttggtcagcctacctgcgcctttctctactaccttgcctacaactacaagcagaaccagtaggc

SEQ ID NO: 102 - DNA, 11611 bp, Artificial Sequence
  plasmid pKS393
  misc_feature (2349)..(2349): n is a, c, g, or t
ggccgcaagtatgaactaaaatgcatgtaggtgtaagagctcatggagagcatggaatattgtatccgaccatgtaacagtataataactgagctccatctcacttcttctatgaataaacaaaggatgttatgatatattaacactctatctatgcaccttattgttctatgataaatttcctcttattattataaatcatctgaatcgtgacggcttatggaatgcttcaaatagtacaaaaacaaatgtgtactataagactttctaaacaattctaaccttagcattgtgaacgagacataagtgttaagaagacataacaattataatggaagaagtttgtctccatttatatattatatattacccacttatgtattatattaggatgttaaggagacataacaattataaagagagaagtttgtatccatttatatattatatactacccatttatatattatacttatccacttatttaatgtctttataaggtttgatccatgatatttctaatattttagttgatatgtatatgaaagggtactatttgaactctcttactctgtataaaggttggatcatccttaaagtgggtctatttaattttattgcttcttacagataaaaaaaaaattatgagttggtttgataaaatattgaaggatttaaaataataataaataacatataatatatgtatataaatttattataatataacatttatctataaaaaagtaaatattgtcataaatctatacaatcgtttagccttgctggacgaatctcaattatttaaacgagagtaaacatatttgactttttggttatttaacaaattattatttaacactatatgaaatttttttttttatcagcaaagaataaaattaaattaagaaggacaatggtgtcccaatccttatacaaccaacttccacaagaaagtcaagtcagagacaacaaaaaaacaagcaaaggaaattttttaatttgagttgtcttgtttgctgcataatttatgcagtaaaacactacacataacccttttagcagtagagcaatggttgaccgtgtgcttagcttcttttattttatttttttatcagcaaagaataaataaaataaaatgagacacttcagggatgtttcaacaagcttggatcctcgaagagaagggttaataacacacttttttaacatttttaacacaaattttagttatttaaaaatttattaaaaaatttaaaataagaagaggaactctttaaataaatctaacttacaaaatttatgatttttaataagttttcaccaataaaaaatgtcataaaaatatgttaaaaagtatattatcaatattctctttatgataaataaaaagaaaaaaaaaataaaagttaagtgaaaatgagattgaagtgactttaggtgtgtataaatatatcaaccccgccaacaatttatttaatccaaatatattgaagtatattattccatagcctttatttatttatatatttattatataaaagctttatttgttctaggttgttcatgaaatatttttttggttttatctccgttgtaagaaaatcatgtgctttgtgtcgccactcactattgcagctttttcatgcattggtcagattgacggttgattgtatttttgttttttatggttttgtgttatgacttaagtcttcatctctttatctcttcatcaggtttgatggttacctaatatggtccatgggtacatgcatggttaaattaggtggccaactttgttgtgaacgatagaattttttttatattaagtaaactatttttatattatgaaataataataaaaaaaatattttatcattattaacaaaatcatattagttaatttgttaactctataataaaagaaatactgtaacattcacattacatggtaacatctttccaccctttcatttgttttttgtttgatgactttttttcttgtttaaatttatttcccttcttttaaatttggaatacattatcatcatatataaactaaaatactaaaaacaggattacacaaatgataaataataacacaaatatttataaatctagctgcaatatatttaaactagctatatcgatattgtaaaataaaactagctgcattgatactgataaaaaaatatcatgtgctttctggactgatgatgcagtatacttttgacattgcctttattttatttttcagaaaagctttcttagttctgggttcttcattatttgtttcccatctccattgtgaattgaatcatttgcttcgtgtcacaaatacaatttagntaggtacatgcattggtcagattcacggtttattatgtcatgacttaagttcatggtagtacattacctgccacgcatgcattatattggttagatttgataggcaaatttggttgtcaacaatataaatataaataatgtttttatattacgaaataacagtgatcaaaacaaacagttttatctttattaacaagattttgtttttgtttgatgacgttttttaatgtttacgctttcccccttcttttgaatttagaacactttatcatcataaaatcaaatactaaaaaaattacatatttcataaataataacacaaatatttttaaaaaatctgaaataataatgaacaatattacatattatcacgaaaattcattaataaaaatattatataaataaaatgtaatagtagttatatgtaggaaaaaagtactgcacgcataatatatacaaaaagattaaaatgaactattataaataataacactaaattaatggtgaatcatatcaaaataatgaaaaagtaaataaaatttgtaattaacttctatatgtattacacacacaaataataaataatagtaaaaaaaattatgataaatatttaccatctcataagatatttaaaataatgataaaaatatagattattttttatgcaactagctagccaaaaagagaacacgggtatatataaaaagagtacctttaaattctactgtacttcctttattcctgacgtttttatatcaagtggacatacgtgaagattttaattatcagtctaaatatttcattagcacttaatacttttctgttttattcctatcctataagtagtcccgattctcccaacattgcttattcacacaactaactaagaaagtcttccatagccccccaagcggcccatggcctcctccgaggacgtcatcaaggagttcatgcgcttcaaggtgcgcatggagggctccgtgaacggccacgagttcgagatcgagggcgagggcgagggccgcccctacgagggcacccagaccgccaagctgaaggtgaccaagggcggccccctgcccttcgcctgggacatcctgtccccccagttccagtacggctccaaggtgtacgtgaagcaccccgccgacatccccgactacaagaagctgtccttccccgagggcttcaagtgggagcgcgtgatgaacttcgaggacggcggcgtggtgaccgtgacccaggactcctccctgcaggacggctccttcatctacaaggtgaagttcatcggcgtgaacttcccctccgacggccccgtaatgcagaagaagactatgggctgggaggcctccaccgagcgcctgtacccccgcgacggcgtgctgaagggcgagatccacaaggccctgaagctgaaggacggcggccactacctggtggagttcaagtccatctacatggccaagaagcccgtgcagctgcccggctactactacgtggactccaagctggacatcacctcccacaacgaggactacaccatcgtggagcagtacgagcgcgccgagggccgccaccacctgttcctgtagcggccggccgcgacacaagtgtgagagtactaaataaatgctttggttgtacgaaatcattacactaaataaaataatcaaagcttatatatgccttccgctaaggccgaatgcaaagaaattggttctttctcgttatcttttgccacttttactagtacgtattaattactacttaatcatctttgtttacggctcattatatccgtcgacggcgcgccgctctagaactagtggatccgtcgacggcgcgcccgatcatccggatatagttcctcctttcagcaaaaaacccctcaagacccgtttagaggccccaaggggttatgctagttattgctcagcggtggcagcagccaactcagcttcctttcgggctttgttagcagccggatcgatccaagctgtacctcactattcctttgccctcggacgagtgctggggcgtcggtttccactatcggcgagtacttctacacagccatcggtccagacggccgcgcttctgcgggcgatttgtgtacgcccgacagtcccggctccggatcggacgattgcgtcgcatcgaccctgcgcccaagctgcatcatcgaaattgccgtcaaccaagctctgatagagttggtcaagaccaatgcggagcatatacgcccggagccgcggcgatcctgcaagctccggatgcctccgctcgaagtagcgcgtctgctgctccatacaagccaaccacggcctccagaagaagatgttggcgacctcgtattgggaatccccgaacatcgcctcgctccagtcaatgaccgctgttatgcggccattgtccgtcaggacattgttggagccgaaatccgcgtgcacgaggtgccggacttcggggcagtcctcggcccaaagcatcagctcatcgagagcctgcgcgacggacgcactgacggtgtcgtccatcacagtttgccagtgatacacatggggatcagcaatcgcgcatatgaaatcacgccatgtagtgtattgaccgattccttgcggtccgaatgggccgaacccgctcgtctggctaagatcggccgcagcgatcgcatccatagcctccgcgaccggctgcagaacagcgggcagttcggtttcaggcaggtcttgcaacgtgacaccctgtgcacggcgggagatgcaataggtcaggctctcgctgaattccccaatgtcaagcacttccggaatcgggagcgcggccgatgcaaagtgccgataaacataacgatctttgtagaaaccatcggcgcagctatttacccgcaggacatatccacgccctcctacatcgaagctgaaagcacgagattcttcgccctccgagagctgcatcaggtcggagacgctgtcgaacttttcgatcagaaacttctcgacagacgtcgcggtgagttcaggcttttccatgggtatatctccttcttaaagttaaacaaaattatttctagagggaaaccgttgtggtctccctatagtgagtcgtattaatttcgcgggatcgagatcgatccaattccaatcccacaaaaatctgagcttaacagcacagttgctcctctcagagcagaatcgggtattcaacaccctcatatcaactactacgttgtgtataacggtccacatgccggtatatacgatgactggggttgtacaaaggcggcaacaaacggcgttcccggagttgcacacaagaaatttgccactattacagaggcaagagcagcagctgacgcgtacacaacaagtcagcaaacagacaggttgaacttcatccccaaaggagaagctcaactcaagcccaagagctttgctaaggccctaacaagcccaccaaagcaaaaagcccactggctcacgctaggaaccaaaaggcccagcagtgatccagccccaaaagagatctcctttgccccggagattacaatggacgatttcctctatctttacgatctaggaaggaagttcgaaggtgaaggtgacgacactatgttcaccactgataatgagaaggttagcctcttcaatttcagaaagaatgctgacccacagatggttagagaggcctacgcagcaggtctcatcaagacgatctacccgagtaacaatctccaggagatcaaataccttcccaagaaggttaaagatgcagtcaaaagattcaggactaattgcatcaagaacacagagaaagacatatttctcaagatcagaagtactattccagtatggacgattcaaggcttgcttcataaaccaaggcaagtaatagagattggagtctctaaaaaggtagttcctactgaatctaaggccatgcatggagtctaagattcaaatcgaggatctaacagaactcgccgtgaagactggcgaacagttcatacagagtcttttacgactcaatgacaagaagaaaatcttcgtcaacatggtggagcacgacactctggtctactccaaaaatgtcaaagatacagtctcagaagaccaaagggctattgagacttttcaacaaaggataatttcgggaaacctcctcggattccattgcccagctatctgtcacttcatcgaaaggacagtagaaaaggaaggtggctcctacaaatgccatcattgcgataaaggaaaggctatcattcaagatgcctctgccgacagtggtcccaaagatggacccccacccacgaggagcatcgtggaaaaagaagacgttccaaccacgtcttcaaagcaagtggattgatgtgacatctccactgacgtaagggatgacgcacaatcccactatccttcgcaagacccttcctctatataaggaagttcatttcatttggagaggacacgctcgagctcatttctctattacttcagccataacaaaagaactcttttctcttcttattaaaccatgaaaaagcctgaactcaccgcgacgtctgtcgagaagtttctgatcgaaaagttcgacagcgtctccgacctgatgcagctctcggagggcgaagaatctcgtgctttcagcttcgatgtaggagggcgtggatatgtcctgcgggtaaatagctgcgccgatggtttctacaaagatcgttatgtttatcggcactttgcatcggccgcgctcccgattccggaagtgcttgacattggggaattcagcgagagcctgacctattgcatctcccgccgtgcacagggtgtcacgttgcaagacctgcctgaaaccgaactgcccgctgttctgcagccggtcgcggaggccatggatgcgatcgctgcggccgatcttagccagacgagcgggttcggcccattcggaccgcaaggaatcggtcaatacactacatggcgtgatttcatatgcgcgattgctgatccccatgtgtatcactggcaaactgtgatggacgacaccgtcagtgcgtccgtcgcgcaggctctcgatgagctgatgctttgggccgaggactgccccgaagtccggcacctcgtgcacgcggatttcggctccaacaatgtcctgacggacaatggccgcataacagcggtcattgactggagcgaggcgatgttcggggattcccaatacgaggtcgccaacatcttcttctggaggccgtggttggcttgtatggagcagcagacgcgctacttcgagcggaggcatccggagcttgcaggatcgccgcggctccgggcgtatatgctccgcattggtcttgaccaactctatcagagcttggttgacggcaatttcgatgatgcagcttgggcgcagggtcgatgcgacgcaatcgtccgatccggagccgggactgtcgggcgtacacaaatcgcccgcagaagcgcggccgtctggaccgatggctgtgtagaagtactcgccgatagtggaaaccgacgccccagcactcgtccgagggcaaaggaatagtgaggtacctaaagaaggagtgcgtcgaagcagatcgttcaaacatttggcaataaagtttcttaagattgaatcctgttgccggtcttgcgatgattatcatataatttctgttgaattacgttaagcatgtaataattaacatgtaatgcatgacgttatttatgagatgggtttttatgattagagtcccgcaattatacatttaatacgcgatagaaaacaaaatatagcgcgcaaactaggataaattatcgcgcgcggtgtcatctatgttactagatcgatgtcgaatctgatcaacctgcattaatgaatcggccaacgcgcggggagaggcggtttgcgtattgggcgctcttccgcttcctcgctcactgactcgctgcgctcggtcgttcggctgcggcgagcggtatcagctcactcaaaggcggtaatacggttatccacagaatcaggggataacgcaggaaagaacatgtgagcaaaaggccagcaaaaggccaggaaccgtaaaaaggccgcgttgctggcgtttttccataggctccgcccccctgacgagcatcacaaaaatcgacgctcaagtcagaggtggcgaaacccgacaggactataaagataccaggcgtttccccctggaagctccctcgtgcgctctcctgttccgaccctgccgcttaccggatacctgtccgcctttctcccttcgggaagcgtggcgctttctcaatgctcacgctgtaggtatctcagttcggtgtaggtcgttcgctccaagctgggctgtgtgcacgaaccccccgttcagcccgaccgctgcgccttatccggtaactatcgtcttgagtccaacccggtaagacacgacttatcgccactggcagcagccactggtaacaggattagcagagcgaggtatgtaggcggtgctacagagttcttgaagtggtggcctaactacggctacactagaaggacagtatttggtatctgcgctctgctgaagccagttaccttcggaaaaagagttggtagctcttgatccggcaaacaaaccaccgctggtagcggtggtttttttgtttgcaagcagcagattacgcgcagaaaaaaaggatctcaagaagatcctttgatcttttctacggggtctgacgctcagtggaacgaaaactcacgttaagggattttggtcatgacattaacctataaaaataggcgtatcacgaggccctttcgtctcgcgcgtttcggtgatgacggtgaaaacctctgacacatgcagctcccggagacggtcacagcttgtctgtaagcggatgccgggagcagacaagcccgtcagggcgcgtcagcgggtgttggcgggtgtcggggctggcttaactatgcggcatcagagcagattgtactgagagtgcaccatatggacatattgtcgttagaacgcggctacaattaatacataaccttatgtatcatacacatacgatttaggtgacactatagaacggcgcgccaagcttttgatccatgcccttcatttgccgcttattaattaatttggtaacagtccgtactaatcagttacttatccttcccccatcataattaatcttggtagtctcgaatgccacaacactgactagtctcttggatcataagaaaaagccaaggaacaaaagaagacaaaacacaatgagagtatcctttgcatagcaatgtctaagttcataaaattcaaacaaaaacgcaatcacacacagtggacatcacttatccactagctgatcaggatcgccgcgtcaagaaaaaaaaactggaccccaaaagccatgcacaacaacacgtactcacaaaggtgtcaatcgagcagcccaaaacattcaccaactcaacccatcatgagccctcacatttgttgtttctaacccaacctcaaactcgtattctcttccgccacctcatttttgtttatttcaacacccgtcaaactgcatgccaccccgtggccaaatgtccatgcatgttaacaagacctatgactataaatagctgcaatctcggcccaggttttcatcatcaagaaccagttcaatatcctagtacaccgtattaaagaatttaagatatactgcggccgcatgaccatcgactcccagtactacaagtcccgcgacaagaacgacaccgctcccaagattgctggtatccgctacgctcctctgtctactccactcttgaaccgctgcgagactttctctttggtgtggcacatcttctccatccctaccttcctcaccatcttcatgctctgctgtgccattcccttgctctggcccttcgtgatcgcttacgttgtgtacgccgtgaaggatgactccccttccaacggcggtgttgtgaagcgctattcccctatctcccgcaacttcttcatctggaagctctttggccgctacttccccatcaccctccacaagaccgttgatttggagcccacccacacttactatcccttggacgtccaagagtaccacctgattgctgagcgctattggcctcagaacaagtacctgcgcgccatcattaccaccatcgagtacttcctgcccgctttcatgaagcgttccctctccatcaacgagcaggagcagcctgctgagagagaccctctgttgtctcccgtttccccctcttctcctggttctcagcccgacaagtggatcaaccatgattcccgctattccagaggtgagtcctctggctccaatggtcatgcttctggctctgaactgaatggcaatggcaacaacggcactaccaatcgccgccctctttcttctgcttccgctggctctactgcttctgactctaccttgctcaacggctctctcaactcctacgccaaccagatcattggcgagaacgaccctcagttgtctcccactaagctcaagcctactggcaggaagtacatcttcgggtaccatcctcacggtatcattgggatgggcgcctttggtggcattgctactgaaggtgctggctggtccaagctctttcctggtatccccgtttccctcatgaccctcaccaacaactttcgcgttcctctctatcgcgagtacctcatgtccctgggcgttgcttccgtttctaagaagtcctgtaaggccctcctcaagcgtaatcagtccatctgcatcgtggtgggtggtgcccaggaatccttgttggctaggcctggtgttatggatctcgtgttgctgaagcgcaagggttttgtgcgcttgggtatggaggtgggcaatgttgccctcgttccaatcatggctttcggcgagaacgatctctacgaccaggtgtccaacgacaagtcctccaagctgtaccgcttccagcagttcgtgaagaacttcctcggcttcaccctccctctcatgcatgccagaggtgtgttcaactacgatgttgggctcgttccctaccgccgccctgtgaacattgtggttggttctcctatcgacttgccttacctccctcatcccaccgatgaggaagtttccgagtaccacgaccgttacatcgctgagctccagcgcatctacaacgagcacaaggacgagtacttcatcgactggactgaggagggtaagggcgctcctgagtttcgtatgatcgagtaggc

SEQ ID NO: 103 - DNA, 11649 bp, Artificial Sequence
  plasmid pKS391
  misc_feature (2349)..(2349): n is a, c, g, or t
ggccgcaagtatgaactaaaatgcatgtaggtgtaagagctcatggagagcatggaatattgtatccgaccatgtaacagtataataactgagctccatctcacttcttctatgaataaacaaaggatgttatgatatattaacactctatctatgcaccttattgttctatgataaatttcctcttattattataaatcatctgaatcgtgacggcttatggaatgcttcaaatagtacaaaaacaaatgtgtactataagactttctaaacaattctaaccttagcattgtgaacgagacataagtgttaagaagacataacaattataatggaagaagtttgtctccatttatatattatatattacccacttatgtattatattaggatgttaaggagacataacaattataaagagagaagtttgtatccatttatatattatatactacccatttatatattatacttatccacttatttaatgtctttataaggtttgatccatgatatttctaatattttagttgatatgtatatgaaagggtactatttgaactctcttactctgtataaaggttggatcatccttaaagtgggtctatttaattttattgcttcttacagataaaaaaaaaattatgagttggtttgataaaatattgaaggatttaaaataataataaataacatataatatatgtatataaatttattataatataacatttatctataaaaaagtaaatattgtcataaatctatacaatcgtttagccttgctggacgaatctcaattatttaaacgagagtaaacatatttgactttttggttatttaacaaattattatttaacactatatgaaatttttttttttatcagcaaagaataaaattaaattaagaaggacaatggtgtcccaatccttatacaaccaacttccacaagaaagtcaagtcagagacaacaaaaaaacaagcaaaggaaattttttaatttgagttgtcttgtttgctgcataatttatgcagtaaaacactacacataacccttttagcagtagagcaatggttgaccgtgtgcttagcttcttttattttatttttttatcagcaaagaataaataaaataaaatgagacacttcagggatgtttcaacaagcttggatcctcgaagagaagggttaataacacacttttttaacatttttaacacaaattttagttatttaaaaatttattaaaaaatttaaaataagaagaggaactctttaaataaatctaacttacaaaatttatgatttttaataagttttcaccaataaaaaatgtcataaaaatatgttaaaaagtatattatcaatattctctttatgataaataaaaagaaaaaaaaaataaaagttaagtgaaaatgagattgaagtgactttaggtgtgtataaatatatcaaccccgccaacaatttatttaatccaaatatattgaagtatattattccatagcctttatttatttatatatttattatataaaagctttatttgttctaggttgttcatgaaatatttttttggttttatctccgttgtaagaaaatcatgtgctttgtgtcgccactcactattgcagctttttcatgcattggtcagattgacggttgattgtatttttgttttttatggttttgtgttatgacttaagtcttcatctctttatctcttcatcaggtttgatggttacctaatatggtccatgggtacatgcatggttaaattaggtggccaactttgttgtgaacgatagaattttttttatattaagtaaactatttttatattatgaaataataataaaaaaaatattttatcattattaacaaaatcatattagttaatttgttaactctataataaaagaaatactgtaacattcacattacatggtaacatctttccaccctttcatttgttttttgtttgatgactttttttcttgtttaaatttatttcccttcttttaaatttggaatacattatcatcatatataaactaaaatactaaaaacaggattacacaaatgataaataataacacaaatatttataaatctagctgcaatatatttaaactagctatatcgatattgtaaaataaaactagctgcattgatactgataaaaaaatatcatgtgctttctggactgatgatgcagtatacttttgacattgcctttattttatttttcagaaaagctttcttagttctgggttcttcattatttgtttcccatctccattgtgaattgaatcatttgcttcgtgtcacaaatacaatttagntaggtacatgcattggtcagattcacggtttattatgtcatgacttaagttcatggtagtacattacctgccacgcatgcattatattggttagatttgataggcaaatttggttgtcaacaatataaatataaataatgtttttatattacgaaataacagtgatcaaaacaaacagttttatctttattaacaagattttgtttttgtttgatgacgttttttaatgtttacgctttcccccttcttttgaatttagaacactttatcatcataaaatcaaatactaaaaaaattacatatttcataaataataacacaaatatttttaaaaaatctgaaataataatgaacaatattacatattatcacgaaaattcattaataaaaatattatataaataaaatgtaatagtagttatatgtaggaaaaaagtactgcacgcataatatatacaaaaagattaaaatgaactattataaataataacactaaattaatggtgaatcatatcaaaataatgaaaaagtaaataaaatttgtaattaacttctatatgtattacacacacaaataataaataatagtaaaaaaaattatgataaatatttaccatctcataagatatttaaaataatgataaaaatatagattattttttatgcaactagctagccaaaaagagaacacgggtatatataaaaagagtacctttaaattctactgtacttcctttattcctgacgtttttatatcaagtggacatacgtgaagattttaattatcagtctaaatatttcattagcacttaatacttttctgttttattcctatcctataagtagtcccgattctcccaacattgcttattcacacaactaactaagaaagtcttccatagccccccaagcggcccatggcctcctccgaggacgtcatcaaggagttcatgcgcttcaaggtgcgcatggagggctccgtgaacggccacgagttcgagatcgagggcgagggcgagggccgcccctacgagggcacccagaccgccaagctgaaggtgaccaagggcggccccctgcccttcgcctgggacatcctgtccccccagttccagtacggctccaaggtgtacgtgaagcaccccgccgacatccccgactacaagaagctgtccttccccgagggcttcaagtgggagcgcgtgatgaacttcgaggacggcggcgtggtgaccgtgacccaggactcctccctgcaggacggctccttcatctacaaggtgaagttcatcggcgtgaacttcccctccgacggccccgtaatgcagaagaagactatgggctgggaggcctccaccgagcgcctgtacccccgcgacggcgtgctgaagggcgagatccacaaggccctgaagctgaaggacggcggccactacctggtggagttcaagtccatctacatggccaagaagcccgtgcagctgcccggctactactacgtggactccaagctggacatcacctcccacaacgaggactacaccatcgtggagcagtacgagcgcgccgagggccgccaccacctgttcctgtagcggccggccgcgacacaagtgtgagagtactaaataaatgctttggttgtacgaaatcattacactaaataaaataatcaaagcttatatatgccttccgctaaggccgaatgcaaagaaattggttctttctcgttatcttttgccacttttactagtacgtattaattactacttaatcatctttgtttacggctcattatatccgtcgacggcgcgccgctctagaactagtggatccgtcgacggcgcgcccgatcatccggatatagttcctcctttcagcaaaaaacccctcaagacccgtttagaggccccaaggggttatgctagttattgctcagcggtggcagcagccaactcagcttcctttcgggctttgttagcagccggatcgatccaagctgtacctcactattcctttgccctcggacgagtgctggggcgtcggtttccactatcggcgagtacttctacacagccatcggtccagacggccgcgcttctgcgggcgatttgtgtacgcccgacagtcccggctccggatcggacgattgcgtcgcatcgaccctgcgcccaagctgcatcatcgaaattgccgtcaaccaagctctgatagagttggtcaagaccaatgcggagcatatacgcccggagccgcggcgatcctgcaagctccggatgcctccgctcgaagtagcgcgtctgctgctccatacaagccaaccacggcctccagaagaagatgttggcgacctcgtattgggaatccccgaacatcgcctcgctccagtcaatgaccgctgttatgcggccattgtccgtcaggacattgttggagccgaaatccgcgtgcacgaggtgccggacttcggggcagtcctcggcccaaagcatcagctcatcgagagcctgcgcgacggacgcactgacggtgtcgtccatcacagtttgccagtgatacacatggggatcagcaatcgcgcatatgaaatcacgccatgtagtgtattgaccgattccttgcggtccgaatgggccgaacccgctcgtctggctaagatcggccgcagcgatcgcatccatagcctccgcgaccggctgcagaacagcgggcagttcggtttcaggcaggtcttgcaacgtgacaccctgtgcacggcgggagatgcaataggtcaggctctcgctgaattccccaatgtcaagcacttccggaatcgggagcgcggccgatgcaaagtgccgataaacataacgatctttgtagaaaccatcggcgcagctatttacccgcaggacatatccacgccctcctacatcgaagctgaaagcacgagattcttcgccctccgagagctgcatcaggtcggagacgctgtcgaacttttcgatcagaaacttctcgacagacgtcgcggtgagttcaggcttttccatgggtatatctccttcttaaagttaaacaaaattatttctagagggaaaccgttgtggtctccctatagtgagtcgtattaatttcgcgggatcgagatcgatccaattccaatcccacaaaaatctgagcttaacagcacagttgctcctctcagagcagaatcgggtattcaacaccctcatatcaactactacgttgtgtataacggtccacatgccggtatatacgatgactggggttgtacaaaggcggcaacaaacggcgttcccggagttgcacacaagaaatttgccactattacagaggcaagagcagcagctgacgcgtacacaacaagtcagcaaacagacaggttgaacttcatccccaaaggagaagctcaactcaagcccaagagctttgctaaggccctaacaagcccaccaaagcaaaaagcccactggctcacgctaggaaccaaaaggcccagcagtgatccagccccaaaagagatctcctttgccccggagattacaatggacgatttcctctatctttacgatctaggaaggaagttcgaaggtgaaggtgacgacactatgttcaccactgataatgagaaggttagcctcttcaatttcagaaagaatgctgacccacagatggttagagaggcctacgcagcaggtctcatcaagacgatctacccgagtaacaatctccaggagatcaaataccttcccaagaaggttaaagatgcagtcaaaagattcaggactaattgcatcaagaacacagagaaagacatatttctcaagatcagaagtactattccagtatggacgattcaaggcttgcttcataaaccaaggcaagtaatagagattggagtctctaaaaaggtagttcctactgaatctaaggccatgcatggagtctaagattcaaatcgaggatctaacagaactcgccgtgaagactggcgaacagttcatacagagtcttttacgactcaatgacaagaagaaaatcttcgtcaacatggtggagcacgacactctggtctactccaaaaatgtcaaagatacagtctcagaagaccaaagggctattgagacttttcaacaaaggataatttcgggaaacctcctcggattccattgcccagctatctgtcacttcatcgaaaggacagtagaaaaggaaggtggctcctacaaatgccatcattgcgataaaggaaaggctatcattcaagatgcctctgccgacagtggtcccaaagatggacccccacccacgaggagcatcgtggaaaaagaagacgttccaaccacgtcttcaaagcaagtggattgatgtgacatctccactgacgtaagggatgacgcacaatcccactatccttcgcaagacccttcctctatataaggaagttcatttcatttggagaggacacgctcgagctcatttctctattacttcagccataacaaaagaactcttttctcttcttattaaaccatgaaaaagcctgaactcaccgcgacgtctgtcgagaagtttctgatcgaaaagttcgacagcgtctccgacctgatgcagctctcggagggcgaagaatctcgtgctttcagcttcgatgtaggagggcgtggatatgtcctgcgggtaaatagctgcgccgatggtttctacaaagatcgttatgtttatcggcactttgcatcggccgcgctcccgattccggaagtgcttgacattggggaattcagcgagagcctgacctattgcatctcccgccgtgcacagggtgtcacgttgcaagacctgcctgaaaccgaactgcccgctgttctgcagccggtcgcggaggccatggatgcgatcgctgcggccgatcttagccagacgagcgggttcggcccattcggaccgcaaggaatcggtcaatacactacatggcgtgatttcatatgcgcgattgctgatccccatgtgtatcactggcaaactgtgatggacgacaccgtcagtgcgtccgtcgcgcaggctctcgatgagctgatgctttgggccgaggactgccccgaagtccggcacctcgtgcacgcggatttcggctccaacaatgtcctgacggacaatggccgcataacagcggtcattgactggagcgaggcgatgttcggggattcccaatacgaggtcgccaacatcttcttctggaggccgtggttggcttgtatggagcagcagacgcgctacttcgagcggaggcatccggagcttgcaggatcgccgcggctccgggcgtatatgctccgcattggtcttgaccaactctatcagagcttggttgacggcaatttcgatgatgcagcttgggcgcagggtcgatgcgacgcaatcgtccgatccggagccgggactgtcgggcgtacacaaatcgcccgcagaagcgcggccgtctggaccgatggctgtgtagaagtactcgccgatagtggaaaccgacgccccagcactcgtccgagggcaaaggaatagtgaggtacctaaagaaggagtgcgtcgaagcagatcgttcaaacatttggcaataaagtttcttaagattgaatcctgttgccggtcttgcgatgattatcatataatttctgttgaattacgttaagcatgtaataattaacatgtaatgcatgacgttatttatgagatgggtttttatgattagagtcccgcaattatacatttaatacgcgatagaaaacaaaatatagcgcgcaaactaggataaattatcgcgcgcggtgtcatctatgttactagatcgatgtcgaatctgatcaacctgcattaatgaatcggccaacgcgcggggagaggcggtttgcgtattgggcgctcttccgcttcctcgctcactgactcgctgcgctcggtcgttcggctgcggcgagcggtatcagctcactcaaaggcggtaatacggttatccacagaatcaggggataacgcaggaaagaacatgtgagcaaaaggccagcaaaaggccaggaaccgtaaaaaggccgcgttgctggcgtttttccataggctccgcccccctgacgagcatcacaaaaatcgacgctcaagtcagaggtggcgaaacccgacaggactataaagataccaggcgtttccccctggaagctccctcgtgcgctctcctgttccgaccctgccgcttaccggatacctgtccgcctttctcccttcgggaagcgtggcgctttctcaatgctcacgctgtaggtatctcagttcggtgtaggtcgttcgctccaagctgggctgtgtgcacgaaccccccgttcagcccgaccgctgcgccttatccggtaactatcgtcttgagtccaacccggtaagacacgacttatcgccactggcagcagccactggtaacaggattagcagagcgaggtatgtaggcggtgctacagagttcttgaagtggtggcctaactacggctacactagaaggacagtatttggtatctgcgctctgctgaagccagttaccttcggaaaaagagttggtagctcttgatccggcaaacaaaccaccgctggtagcggtggtttttttgtttgcaagcagcagattacgcgcagaaaaaaaggatctcaagaagatcctttgatcttttctacggggtctgacgctcagtggaacgaaaactcacgttaagggattttggtcatgacattaacctataaaaataggcgtatcacgaggccctttcgtctcgcgcgtttcggtgatgacggtgaaaacctctgacacatgcagctcccggagacggtcacagcttgtctgtaagcggatgccgggagcagacaagcccgtcagggcgcgtcagcgggtgttggcgggtgtcggggctggcttaactatgcggcatcagagcagattgtactgagagtgcaccatatggacatattgtcgttagaacgcggctacaattaatacataaccttatgtatcatacacatacgatttaggtgacactatagaacggcgcgccaagcttttgatccatgcccttcatttgccgcttattaattaatttggtaacagtccgtactaatcagttacttatccttcccccatcataattaatcttggtagtctcgaatgccacaacactgactagtctcttggatcataagaaaaagccaaggaacaaaagaagacaaaacacaatgagagtatcctttgcatagcaatgtctaagttcataaaattcaaacaaaaacgcaatcacacacagtggacatcacttatccactagctgatcaggatcgccgcgtcaagaaaaaaaaactggaccccaaaagccatgcacaacaacacgtactcacaaaggtgtcaatcgagcagcccaaaacattcaccaactcaacccatcatgagccctcacatttgttgtttctaacccaacctcaaactcgtattctcttccgccacctcatttttgtttatttcaacacccgtcaaactgcatgccaccccgtggccaaatgtccatgcatgttaacaagacctatgactataaatagctgcaatctcggcccaggttttcatcatcaagaaccagttcaatatcctagtacaccgtattaaagaatttaagatatactgcggcccatggaggtccgacgacgaaagatagacgtgctcaaggcccagaaaaacggctacgaatcgggcccaccatctcgacaatcgtcgcagccctcctcaagagcatcgtccagaacccgcaacaaacactcctcgtccaccctgtcgctcagcggactgaccatgaaagtccagaagaaacctgcgggacccccggcgaactccaaaacgccattcctacacatcaagcccgtgcacacgtgctgctccacatcaatgctttcgcgcgattatgacggctccaaccccagcttcaagggcttcaaaaacatcggcatgatcattctcattgtgggaaatctacggctcgcattcgaaaactacctcaaatacggcatttccaacccgttcttcgaccccaaaattactccttccgagtggcagctctcaggcttgctcatagtcgtggcctacgcacatatcctcatggcctacgctattgagagcgctgccaagctgctgttcctctctagcaaacaccactacatggccgtggggcttctgcataccatgaacactttgtcgtccatctcgttgctgtcctacgtcgtctactactacctgcccaaccccgtggcaggcacaatagtcgagtttgtggccgttattctgtctctcaaactcgcctcatacgccctcactaactcggatctccgaaaagccgcaattcatgcccagaagctcgacaagacgcaagacgataacgaaaaggaatccacctcgtcttcctcttcttcagatgacgcagagactttggcagacattgacgtcattcctgcatactacgcacagctgccctacccccagaatgtgacgctgtcgaacctgctgtacttctggtttgctcccacactggtctaccagcccgtgtaccccaagacggagcgtattcgacccaagcacgtgatccgaaacctgtttgagctcgtctctctgtgcatgcttattcagtttctcatcttccagtacgcctaccccatcatgcagtcgtgtctggctctgttcttccagcccaagctcgattatgccaacatctccgagcgcctcatgaagttggcctccgtgtctatgatggtctggctcattggattctacgctttcttccagaacggtctcaatcttattgccgagctcacctgttttggaaacagaaccttctaccagcagtggtggaattcccgctccattggccagtactggactctatggaacaagccagtcaaccagtactttagacaccacgtctacgtgcctcttctcgctcggggcatgtcgcggttcaatgcgtcggtggtggttttctttttctccgccgtcatccatgaactgcttgtcggcatccccactcacaacatcatcggagccgccttcttcggcatgatgtcgcaggtgcctctgatcatggctactgagaaccttcagcatattaactcctctctgggccccttccttggcaactgtgcattctggttcacctttttcctgggacaacccacttgtgcattcctttactatttggcctacaactacaagcagaaccagtagcggcc

SEQ ID NO: 104 - DNA, 7674 bp, Artificial Sequence
  plasmid pFBAIn-YLPAT1
ggccgcaagtgtggatggggaagtgagtgcccggttctgtgtgcacaattggcaatccaagatggatggattcaacacagggatatagcgagctacgtggtggtgcgaggatatagcaacggatatttatgtttgacacttgagaatgtacgatacaagcactgtccaagtacaatactaaacatactgtacatactcatactcgtacccgggcaacggtttcacttgagtgcagtggctagtgctcttactcgtacagtgtgcaatactgcgtatcatagtctttgatgtatatcgtattcattcatgttagttgcgtacgagccggaagcataaagtgtaaagcctggggtgcctaatgagtgagctaactcacattaattgcgttgcgctcactgcccgctttccagtcgggaaacctgtcgtgccagctgcattaatgaatcggccaacgcgcggggagaggcggtttgcgtattgggcgctcttccgcttcctcgctcactgactcgctgcgctcggtcgttcggctgcggcgagcggtatcagctcactcaaaggcggtaatacggttatccacagaatcaggggataacgcaggaaagaacatgtgagcaaaaggccagcaaaaggccaggaaccgtaaaaaggccgcgttgctggcgtttttccataggctccgcccccctgacgagcatcacaaaaatcgacgctcaagtcagaggtggcgaaacccgacaggactataaagataccaggcgtttccccctggaagctccctcgtgcgctctcctgttccgaccctgccgcttaccggatacctgtccgcctttctcccttcgggaagcgtggcgctttctcatagctcacgctgtaggtatctcagttcggtgtaggtcgttcgctccaagctgggctgtgtgcacgaaccccccgttcagcccgaccgctgcgccttatccggtaactatcgtcttgagtccaacccggtaagacacgacttatcgccactggcagcagccactggtaacaggattagcagagcgaggtatgtaggcggtgctacagagttcttgaagtggtggcctaactacggctacactagaaggacagtatttggtatctgcgctctgctgaagccagttaccttcggaaaaagagttggtagctcttgatccggcaaacaaaccaccgctggtagcggtggtttttttgtttgcaagcagcagattacgcgcagaaaaaaaggatctcaagaagatcctttgatcttttctacggggtctgacgctcagtggaacgaaaactcacgttaagggattttggtcatgagattatcaaaaaggatcttcacctagatccttttaaattaaaaatgaagttttaaatcaatctaaagtatatatgagtaaacttggtctgacagttaccaatgcttaatcagtgaggcacctatctcagcgatctgtctatttcgttcatccatagttgcctgactccccgtcgtgtagataactacgatacgggagggcttaccatctggccccagtgctgcaatgataccgcgagacccacgctcaccggctccagatttatcagcaataaaccagccagccggaagggccgagcgcagaagtggtcctgcaactttatccgcctccatccagtctattaattgttgccgggaagctagagtaagtagttcgccagttaatagtttgcgcaacgttgttgccattgctacaggcatcgtggtgtcacgctcgtcgtttggtatggcttcattcagctccggttcccaacgatcaaggcgagttacatgatcccccatgttgtgcaaaaaagcggttagctccttcggtcctccgatcgttgtcagaagtaagttggccgcagtgttatcactcatggttatggcagcactgcataattctcttactgtcatgccatccgtaagatgcttttctgtgactggtgagtactcaaccaagtcattctgagaatagtgtatgcggcgaccgagttgctcttgcccggcgtcaatacgggataataccgcgccacatagcagaactttaaaagtgctcatcattggaaaacgttcttcggggcgaaaactctcaaggatcttaccgctgttgagatccagttcgatgtaacccactcgtgcacccaactgatcttcagcatcttttactttcaccagcgtttctgggtgagcaaaaacaggaaggcaaaatgccgcaaaaaagggaataagggcgacacggaaatgttgaatactcatactcttcctttttcaatattattgaagcatttatcagggttattgtctcatgagcggatacatatttgaatgtatttagaaaaataaacaaataggggttccgcgcacatttccccgaaaagtgccacctgacgcgccctgtagcggcgcattaagcgcggcgggtgtggtggttacgcgcagcgtgaccgctacacttgccagcgccctagcgcccgctcctttcgctttcttcccttcctttctcgccacgttcgccggctttccccgtcaagctctaaatcgggggctccctttagggttccgatttagtgctttacggcacctcgaccccaaaaaacttgattagggtgatggttcacgtagtgggccatcgccctgatagacggtttttcgccctttgacgttggagtccacgttctttaatagtggactcttgttccaaactggaacaacactcaaccctatctcggtctattcttttgatttataagggattttgccgatttcggcctattggttaaaaaatgagctgatttaacaaaaatttaacgcgaattttaacaaaatattaacgcttacaatttccattcgccattcaggctgcgcaactgttgggaagggcgatcggtgcgggcctcttcgctattacgccagctggcgaaagggggatgtgctgcaaggcgattaagttgggtaacgccagggttttcccagtcacgacgttgtaaaacgacggccagtgaattgtaatacgactcactatagggcgaattgggtaccgggccccccctcgaggtcgatggtgtcgataagcttgatatcgaattcatgtcacacaaaccgatcttcgcctcaaggaaacctaattctacatccgagagactgccgagatccagtctacactgattaattttcgggccaataatttaaaaaaatcgtgttatataatattatatgtattatatatatacatcatgatgatactgacagtcatgtcccattgctaaatagacagactccatctgccgcctccaactgatgttctcaatatttaaggggtcatctcgcattgtttaataataaacagactccatctaccgcctccaaatgatgttctcaaaatatattgtatgaacttatttttattacttagtattattagacaacttacttgctttatgaaaaacacttcctatttaggaaacaatttataatggcagttcgttcatttaacaatttatgtagaataaatgttataaatgcgtatgggaaatcttaaatatggatagcataaatgatatctgcattgcctaattcgaaatcaacagcaacgaaaaaaatcccttgtacaacataaatagtcatcgagaaatatcaactatcaaagaacagctattcacacgttactattgagattattattggacgagaatcacacactcaactgtctttctctcttctagaaatacaggtacaagtatgtactattctcattgttcatacttctagtcatttcatcccacatattccttggatttctctccaatgaatgacattctatcttgcaaattcaacaattataataagatataccaaagtagcggtatagtggcaatcaaaaagcttctctggtgtgcttctcgtatttatttttattctaatgatccattaaaggtatatatttatttcttgttatataatccttttgtttattacatgggctggatacataaaggtattttgatttaattttttgcttaaattcaatcccccctcgttcagtgtcaactgtaatggtaggaaattaccatacttttgaagaagcaaaaaaaatgaaagaaaaaaaaaatcgtatttccaggttagacgttccgcagaatctagaatgcggtatgcggtacattgttcttcgaacgtaaaagttgcgctccctgagatattgtacatttttgcttttacaagtacaagtacatcgtacaactatgtactactgttgatgcatccacaacagtttgttttgtttttttttgttttttttttttctaatgattcattaccgctatgtatacctacttgtacttgtagtaagccgggttattggcgttcaattaatcatagacttatgaatctgcacggtgtgcgctgcgagttacttttagcttatgcatgctacttgggtgtaatattgggatctgttcggaaatcaacggatgctcaatcgatttcgacagtaattaattaagtcatacacaagtcagctttcttcgagcctcatataagtataagtagttcaacgtattagcactgtacccagcatctccgtatcgagaaacacaacaacatgccccattggacagatcatgcggatacacaggttgtgcagtatcatacatactcgatcagacaggtcgtctgaccatcatacaagctgaacaagcgctccatacttgcacgctctctatatacacagttaaattacatatccatagtctaacctctaacagttaatcttctggtaagcctcccagccagccttctggtatcgcttggcctcctcaataggatctcggttctggccgtacagacctcggccgacaattatgatatccgttccggtagacatgacatcctcaacagttcggtactgctgtccgagagcgtctcccttgtcgtcaagacccaccccgggggtcagaataagccagtcctcagagtcgcccttaggtcggttctgggcaatgaagccaaccacaaactcggggtcggatcgggcaagctcaatggtctgcttggagtactcgccagtggccagagagcccttgcaagacagctcggccagcatgagcagacctctggccagcttctcgttgggagaggggactaggaactccttgtactgggagttctcgtagtcagagacgtcctccttcttctgttcagagacagtttcctcggcaccagctcgcaggccagcaatgattccggttccgggtacaccgtgggcgttggtgatatcggaccactcggcgattcggtgacaccggtactggtgcttgacagtgttgccaatatctgcgaactttctgtcctcgaacaggaagaaaccgtgcttaagagcaagttccttgagggggagcacagtgccggcgtaggtgaagtcgtcaatgatgtcgatatgggttttgatcatgcacacataaggtccgaccttatcggcaagctcaatgagctccttggtggtggtaacatccagagaagcacacaggttggttttcttggctgccacgagcttgagcactcgagcggcaaaggcggacttgtggacgttagctcgagcttcgtaggagggcattttggtggtgaagaggagactgaaataaatttagtctgcagaactttttatcggaaccttatctggggcagtgaagtatatgttatggtaatagttacgagttagttgaacttatagatagactggactatacggctatcggtccaaattagaaagaacgtcaatggctctctgggcgtcgcctttgccgacaaaaatgtgatcatgatgaaagccagcaatgacgttgcagctgatattgttgtcggccaaccgcgccgaaaacgcagctgtcagacccacagcctccaacgaagaatgtatcgtcaaagtgatccaagcacactcatagttggagtcgtactccaaaggcggcaatgacgagtcagacagatactcgtcgaaaacagtgtacgcagatctactatagaggaacatttaaattgccccggagaagacggccaggccgcctagatgacaaattcaacaactcacagctgactttctgccattgccactaggggggggcctttttatatggccaagccaagctctccacgtcggttgggctgcacccaacaataaatgggtagggttgcaccaacaaagggatgggatggggggtagaagatacgaggataacggggctcaatggcacaaataagaacgaatactgccattaagactcgtgatccagcgactgacaccattgcatcatctaagggcctcaaaactacctcggaactgctgcgctgatctggacaccacagaggttccgagcactttaggttgcaccaaatgtcccaccaggtgcaggcagaaaacgctggaacagcgtgtacagtttgtcttaacaaaaagtgagggcgctgaggtcgagcagggtggtgtgacttgttatagcctttagagctgcgaaagcgcgtatggatttggctcatcaggccagattgagggtctgtggacacatgtcatgttagtgtacttcaatcgccccctggatatagccccgacaataggccgtggcctcatttttttgccttccgcacatttccattgctcggtacccacaccttgcttctcctgcacttgccaaccttaatactggtttacattgaccaacatcttacaagcggggggcttgtctagggtatatataaacagtggctctcccaatcggttgccagtctcttttttcctttctttccccacagattcgaaatctaaactacacatcacagaattccgagccgtgagtatccacgacaagatcagtgtcgagacgacgcgttttgtgtaatgacacaatccgaaagtcgctagcaacacacactctctacacaaactaacccagctctggtaccatggtggtcgtggacgatgttctcggtaatcatctatcaagatacgactatatgatctacgcactaatcaacaaccagcattgcgccaagtcgcaccttgcattcctgtcctggaaacacatcttttctctctttagcctcagcaagattctgcccttctaccgacttgacgaaaactggatgttcgaatcagcagccgaccttgagaaagaactagccaagctaatcaacccttactgtctggtgctgttcccagaagtctcggtggcaaccccacaacttatcagacgacatagagagctctgcagagcgtgttttgcacctgaactcactcatgtactctaccctcgccacagcagctttgcagacttcatattgggactgaataagggccaggctcttagttacatctacgacgccaccatctcgtatactgacaagaaagataagattctatgtaatcctggaaacatagatactctgttgactcaagtggaaacggttcatgttcacatacaccgagaacagtatcgtcggctgccgcgccacagacgtggtattcagaagtggctggaaaacacatgggtccacaaggataagagtatcagaaaggcctacaagcagtctggatcaatcatggatgatggcaagctcaaggagaaggataagtgatactaactaactgcagc

SEQ ID NO: 105 - DNA, 4391 bp, Artificial Sequence
  plasmid pKR1239
gtacgtctagaggatcccccgggctgcaggaattcactggccgtcgttttacaacgtcgtgactgggaaaaccctggcgttacccaacttaatcgccttgcagcacatccccctttcgccagctggcgtaatagcgaagaggcccgcaccgatcgcccttcccaacagttgcgcagcctgaatggcgaatggcgcctgatgcggtattttctccttacgcatctgtgcggtatttcacaccgcatatggtgcactctcagtacaatctgctctgatgccgcatagttaagccagccccgacacccgccaacacccgctgacgcgccctgacgggcttgtctgctcccggcatccgcttacagacaagctgtgaccgtctccgggagctgcatgtgtcagaggttttcaccgtcatcaccgaaacgcgcgagacgaaagggcctcgtgatacgcctatttttataggttaatgtcatgataataatggtttcttagacgtcaggtggcacttttcggggaaatgtgcgcggaacccctatttgtttatttttctaaatacattcaaatatgtatccgctcatgagacaataaccctgataaatgcttcaataatattgaaaaaggaagagtatgagtattcaacatttccgtgtcgcccttattcccttttttgcggcattttgccttcctgtttttgctcacccagaaacgctggtgaaagtaaaagatgctgaagatcagttgggtgcacgagtgggttacatcgaactggatctcaacagcggtaagatccttgagagttttcgccccgaagaacgttttccaatgatgagcacttttaaagttctgctatgtggcgcggtattatcccgtattgacgccgggcaagagcaactcggtcgccgcatacactattctcagaatgacttggttgagtactcaccagtcacagaaaagcatcttacggatggcatgacagtaagagaattatgcagtgctgccataaccatgagtgataacactgcggccaacttacttctgacaacgatcggaggaccgaaggagctaaccgcttttttgcacaacatgggggatcatgtaactcgccttgatcgttgggaaccggagctgaatgaagccataccaaacgacgagcgtgacaccacgatgcctgtagcaatggcaacaacgttgcgcaaactattaactggcgaactacttactctagcttcccggcaacaattaatagactggatggaggcggataaagttgcaggaccacttctgcgctcggcccttccggctggctggtttattgctgataaatctggagccggtgagcgtgggtctcgcggtatcattgcagcactggggccagatggtaagccctcccgtatcgtagttatctacacgacggggagtcaggcaactatggatgaacgaaatagacagatcgctgagataggtgcctcactgattaagcattggtaactgtcagaccaagtttactcatatatactttagattgatttaaaacttcatttttaatttaaaaggatctaggtgaagatcctttttgataatctcatgaccaaaatcccttaacgtgagttttcgttccactgagcgtcagaccccgtagaaaagatcaaaggatcttcttgagatcctttttttctgcgcgtaatctgctgcttgcaaacaaaaaaaccaccgctaccagcggtggtttgtttgccggatcaagagctaccaactctttttccgaaggtaactggcttcagcagagcgcagataccaaatactgtccttctagtgtagccgtagttaggccaccacttcaagaactctgtagcaccgcctacatacctcgctctgctaatcctgttaccagtggctgctgccagtggcgataagtcgtgtcttaccgggttggactcaagacgatagttaccggataaggcgcagcggtcgggctgaacggggggttcgtgcacacagcccagcttggagcgaacgacctacaccgaactgagatacctacagcgtgagctatgagaaagcgccacgcttcccgaagggagaaaggcggacaggtatccggtaagcggcagggtcggaacaggagagcgcacgagggagcttccagggggaaacgcctggtatctttatagtcctgtcgggtttcgccacctctgacttgagcgtcgatttttgtgatgctcgtcaggggggcggagcctatggaaaaacgccagcaacgcggcctttttacggttcctggccttttgctggccttttgctcacatgttctttcctgcgttatcccctgattctgtggataaccgtattaccgcctttgagtgagctgataccgctcgccgcagccgaacgaccgagcgcagcgagtcagtgagcgaggaagcggaagagcgcccaatacgcaaaccgcctctccccgcgcgttggccgattcattaatgcagctggcacgacaggtttcccgactggaaagcgggcagtgagcgcaacgcaattaatgtgagttagctcactcattaggcaccccaggctttacactttatgcttccggctcgtatgttgtgtggaattgtgagcggataacaatttcacacaggaaacagctatgaccatgattacgccaagcttgcatgcctgcaggctagcctaagtacgtactcaaaatgccaacaaataaaaaaaaagttgctttaataatgccaaaacaaattaataaaacacttacaacaccggattttttttaattaaaatgtgccatttaggataaatagttaatatttttaataattatttaaaaagccgtatctactaaaatgatttttatttggttgaaaatattaatatgtttaaatcaacacaatctatcaaaattaaactaaaaaaaaaataagtgtacgtggttaacattagtacagtaatataagaggaaaatgagaaattaagaaattgaaagcgagtctaatttttaaattatgaacctgcatatataaaaggaaagaaagaatccaggaagaaaagaaatgaaaccatgcatggtcccctcgtcatcacgagtttctgccatttgcaatagaaacactgaaacacctttctctttgtcacttaattgagatgccgaagccacctcacaccatgaacttcatgaggtgtagcacccaaggcttccatagccatgcatactgaagaatgtctcaagctcagcaccctacttctgtgacgtgtccctcattcaccttcctctcttccctataaataaccacgcctcaggttctccgcttcacaactcaaacattctctccattggtccttaaacactcatcagtcatcaccgcggccgcaaaccatggtggtcgtggacgatgttctcggtaatcatctatcaagatacgactatatgatctacgcactaatcaacaaccagcattgcgccaagtcgcaccttgcattcctgtcctggaaacacatcttttctctctttagcctcagcaagattctgcccttctaccgacttgacgaaaactggatgttcgaatcagcagccgaccttgagaaagaactagccaagctaatcaacccttactgtctggtgctgttcccagaagtctcggtggcaaccccacaacttatcagacgacatagagagctctgcagagcgtgttttgcacctgaactcactcatgtactctaccctcgccacagcagctttgcagacttcatattgggactgaataagggccaggctcttagttacatctacgacgccaccatctcgtatactgacaagaaagataagattctatgtaatcctggaaacatagatactctgttgactcaagtggaaacggttcatgttcacatacaccgagaacagtatcgtcggctgccgcgccacagacgtggtattcagaagtggctggaaaacacatgggtccacaaggataagagtatcagaaaggcctacaagcagtctggatcaatcatggatgatggcaagctcaaggagaaggataagtgatactaactaactgcagcggccgcaagtgtggatggggaagtgagtgcccggttctgtgtgcacaattggcaatccaagatggatggattcaacacagggatatagcgagctacgtggtggtgcgaggatatagcaacggatatttatgtttgacacttgagaatgtacgatacaagcactgtccaagtacaatactaaacatactgtacatactcatactcgtacccgggcaacggtttcacttgagtgcagtggctagtgctcttactcgtacagtgtgcaatactgcgtatcatagtctttgatgtatatcgtattcattcatgttagttgc

SEQ ID NO: 106 - DNA, 5252 bp, Artificial Sequence
  plasmid pKR457
  misc_feature (3872)..(3872): n is a, c, g, or t
gtacgtgggcggatcccccgggctgcaggaattcactggccgtcgttttacaacgtcgtgactgggaaaaccctggcgttacccaacttaatcgccttgcagcacatccccctttcgccagctggcgtaatagcgaagaggcccgcaccgatcgcccttcccaacagttgcgcagcctgaatggcgaatggcgcctgatgcggtattttctccttacgcatctgtgcggtatttcacaccgcatatggtgcactctcagtacaatctgctctgatgccgcatagttaagccagccccgacacccgccaacacccgctgacgcgccctgacgggcttgtctgctcccggcatccgcttacagacaagctgtgaccgtctccgggagctgcatgtgtcagaggttttcaccgtcatcaccgaaacgcgcgagacgaaagggcctcgtgatacgcctatttttataggttaatgtcatgataataatggtttcttagacgtcaggtggcacttttcggggaaatgtgcgcggaacccctatttgtttatttttctaaatacattcaaatatgtatccgctcatgagacaataaccctgataaatgcttcaataatattgaaaaaggaagagtatgagtattcaacatttccgtgtcgcccttattcccttttttgcggcattttgccttcctgtttttgctcacccagaaacgctggtgaaagtaaaagatgctgaagatcagttgggtgcacgagtgggttacatcgaactggatctcaacagcggtaagatccttgagagttttcgccccgaagaacgttttccaatgatgagcacttttaaagttctgctatgtggcgcggtattatcccgtattgacgccgggcaagagcaactcggtcgccgcatacactattctcagaatgacttggttgagtactcaccagtcacagaaaagcatcttacggatggcatgacagtaagagaattatgcagtgctgccataaccatgagtgataacactgcggccaacttacttctgacaacgatcggaggaccgaaggagctaaccgcttttttgcacaacatgggggatcatgtaactcgccttgatcgttgggaaccggagctgaatgaagccataccaaacgacgagcgtgacaccacgatgcctgtagcaatggcaacaacgttgcgcaaactattaactggcgaactacttactctagcttcccggcaacaattaatagactggatggaggcggataaagttgcaggaccacttctgcgctcggcccttccggctggctggtttattgctgataaatctggagccggtgagcgtgggtctcgcggtatcattgcagcactggggccagatggtaagccctcccgtatcgtagttatctacacgacggggagtcaggcaactatggatgaacgaaatagacagatcgctgagataggtgcctcactgattaagcattggtaactgtcagaccaagtttactcatatatactttagattgatttaaaacttcatttttaatttaaaaggatctaggtgaagatcctttttgataatctcatgaccaaaatcccttaacgtgagttttcgttccactgagcgtcagaccccgtagaaaagatcaaaggatcttcttgagatcctttttttctgcgcgtaatctgctgcttgcaaacaaaaaaaccaccgctaccagcggtggtttgtttgccggatcaagagctaccaactctttttccgaaggtaactggcttcagcagagcgcagataccaaatactgtccttctagtgtagccgtagttaggccaccacttcaagaactctgtagcaccgcctacatacctcgctctgctaatcctgttaccagtggctgctgccagtggcgataagtcgtgtcttaccgggttggactcaagacgatagttaccggataaggcgcagcggtcgggctgaacggggggttcgtgcacacagcccagcttggagcgaacgacctacaccgaactgagatacctacagcgtgagctatgagaaagcgccacgcttcccgaagggagaaaggcggacaggtatccggtaagcggcagggtcggaacaggagagcgcacgagggagcttccagggggaaacgcctggtatctttatagtcctgtcgggtttcgccacctctgacttgagcgtcgatttttgtgatgctcgtcaggggggcggagcctatggaaaaacgccagcaacgcggcctttttacggttcctggccttttgctggccttttgctcacatgttctttcctgcgttatcccctgattctgtggataaccgtattaccgcctttgagtgagctgataccgctcgccgcagccgaacgaccgagcgcagcgagtcagtgagcgaggaagcggaagagcgcccaatacgcaaaccgcctctccccgcgcgttggccgattcattaatgcagctggcacgacaggtttcccgactggaaagcgggcagtgagcgcaacgcaattaatgtgagttagctcactcattaggcaccccaggctttacactttatgcttccggctcgtatgttgtgtggaattgtgagcggataacaatttcacacaggaaacagctatgaccatgattacgccaagcttgcatgcctgcaggtcgactcgacgtacgtcctcgaagagaagggttaataacacattttttaacatttttaacacaaattttagttatttaaaaatttattaaaaaatttaaaataagaagaggaactctttaaataaatctaacttacaaaatttatgatttttaataagttttcaccaataaaaaatgtcataaaaatatgttaaaaagtatattatcaatattctctttatgataaataaaaagaaaaaaaaaataaaagttaagtgaaaatgagattgaagtgactttaggtgtgtataaatatatcaaccccgccaacaatttatttaatccaaatatattgaagtatattattccatagcctttatttatttatatatttattatataaaagctttatttgttctaggttgttcatgaaatatttttttggttttatctccgttgtaagaaaatcatgtgctttgtgtcgccactcactattgcagctttttcatgcattggtcagattgacggttgattgtatttttgttttttatggttttgtgttatgacttaagtcttcatctctttatctcttcatcaggtttgatggttacctaatatggtccatgggtacatgcatggttaaattaggtggccaactttgttgtgaacgatagaattttttttatattaagtaaactatttttatattatgaaataataataaaaaaaatattttatcattattaacaaaatcatattagttaatttgttaactctataataaaagaaatactgtaacattcacattacatggtaacatctttccaccctttcatttgttttttgtttgatgactttttttcttgtttaaatttatttcccttcttttaaatttggaatacattatcatcatatataaactaaaatactaaaaacaggattacacaaatgataaataataacacaaatatttataaatctagctgcaatatatttaaactagctatatcgatattgtaaaataaaactagctgcattgatactgataaaaaaatatcatgtgctttctggactgatgatgcagtatacttttgacattgcctttattttatttttcagaaaagctttcttagttctgggttcttcattatttgtttcccatctccattgtgaattgaatcatttgcttcgtgtcacaaatacaatttagntaggtacatgcattggtcagattcacggtttattatgtcatgacttaagttcatggtagtacattacctgccacgcatgcattatattggttagatttgataggcaaatttggttgtcaacaatataaatataaataatgtttttatattacgaaataacagtgatcaaaacaaacagttttatctttattaacaagattttgtttttgtttgatgacgttttttaatgtttacgctttcccccttcttttgaatttagaacactttatcatcataaaatcaaatactaaaaaaattacatatttcataaataataacacaaatatttttaaaaaatctgaaataataatgaacaatattacatattatcacgaaaattcattaataaaaatattatataaataaaatgtaatagtagttatatgtaggaaaaaagtactgcacgcataatatatacaaaaagattaaaatgaactattataaataataacactaaattaatggtgaatcatatcaaaataatgaaaaagtaaataaaatttgtaattaacttctatatgtattacacacacaaataataaataatagtaaaaaaaattatgataaatatttaccatctcataagatatttaaaataatgataaaaatatagattattttttatgcaactagctagccaaaaagagaacacgggtatatataaaaagagtacctttaaattctactgtacttcctttattcctgacgtttttatatcaagtggacatacgtgaagattttaattatcagtctaaatatttcattagcacttaatacttttctgttttattcctatcctataagtagtcccgattctcccaacattgcttattcacacaactaactaagaaagtcttccatagccccccaagcggccgcgacacaagtgtgagagtactaaataaatgctttggttgtacgaaatcattacactaaataaaataatcaaagcttatatatgccttccgctaaggccgaatgcaaagaaattggttctttctcgttatcttttgccacttttactagtacgtattaattactacttaatcatctttgtttacggctcattatatccggtctagaggatccaaggccgcgaagttaaaagcaatgttgtcacttgtcgtactaacacatgatgtgatagtttatgctagctagctataacataagctgtctctgagtgtgttgtatattaataaagatcatcactggtgaatggtgatcgtgtacgtaccctacttagtaggcaatggaagcacttagagtgtgctttgtgcatggccttgcctctgttttgagacttttgtaatgttttcgagtttaaatctttgcctttgc

SEQ ID NO: 107 - DNA, 5952 bp, Artificial Sequence
  plasmid pKR1242
  misc_feature (4340)..(4340): n is a, c, g, or t
ggccgcgacacaagtgtgagagtactaaataaatgctttggttgtacgaaatcattacactaaataaaataatcaaagcttatatatgccttccgctaaggccgaatgcaaagaaattggttctttctcgttatcttttgccacttttactagtacgtattaattactacttaatcatctttgtttacggctcattatatccggtctagaggatccaaggccgcgaagttaaaagcaatgttgtcacttgtcgtactaacacatgatgtgatagtttatgctagctagctataacataagctgtctctgagtgtgttgtatattaataaagatcatcactggtgaatggtgatcgtgtacgtaccctacttagtaggcaatggaagcacttagagtgtgctttgtgcatggccttgcctctgttttgagacttttgtaatgttttcgagtttaaatctttgcctttgcgtacgtgggcggatcccccgggctgcaggaattcactggccgtcgttttacaacgtcgtgactgggaaaaccctggcgttacccaacttaatcgccttgcagcacatccccctttcgccagctggcgtaatagcgaagaggcccgcaccgatcgcccttcccaacagttgcgcagcctgaatggcgaatggcgcctgatgcggtattttctccttacgcatctgtgcggtatttcacaccgcatatggtgcactctcagtacaatctgctctgatgccgcatagttaagccagccccgacacccgccaacacccgctgacgcgccctgacgggcttgtctgctcccggcatccgcttacagacaagctgtgaccgtctccgggagctgcatgtgtcagaggttttcaccgtcatcaccgaaacgcgcgagacgaaagggcctcgtgatacgcctatttttataggttaatgtcatgataataatggtttcttagacgtcaggtggcacttttcggggaaatgtgcgcggaacccctatttgtttatttttctaaatacattcaaatatgtatccgctcatgagacaataaccctgataaatgcttcaataatattgaaaaaggaagagtatgagtattcaacatttccgtgtcgcccttattcccttttttgcggcattttgccttcctgtttttgctcacccagaaacgctggtgaaagtaaaagatgctgaagatcagttgggtgcacgagtgggttacatcgaactggatctcaacagcggtaagatccttgagagttttcgccccgaagaacgttttccaatgatgagcacttttaaagttctgctatgtggcgcggtattatcccgtattgacgccgggcaagagcaactcggtcgccgcatacactattctcagaatgacttggttgagtactcaccagtcacagaaaagcatcttacggatggcatgacagtaagagaattatgcagtgctgccataaccatgagtgataacactgcggccaacttacttctgacaacgatcggaggaccgaaggagctaaccgcttttttgcacaacatgggggatcatgtaactcgccttgatcgttgggaaccggagctgaatgaagccataccaaacgacgagcgtgacaccacgatgcctgtagcaatggcaacaacgttgcgcaaactattaactggcgaactacttactctagcttcccggcaacaattaatagactggatggaggcggataaagttgcaggaccacttctgcgctcggcccttccggctggctggtttattgctgataaatctggagccggtgagcgtgggtctcgcggtatcattgcagcactggggccagatggtaagccctcccgtatcgtagttatctacacgacggggagtcaggcaactatggatgaacgaaatagacagatcgctgagataggtgcctcactgattaagcattggtaactgtcagaccaagtttactcatatatactttagattgatttaaaacttcatttttaatttaaaaggatctaggtgaagatcctttttgataatctcatgaccaaaatcccttaacgtgagttttcgttccactgagcgtcagaccccgtagaaaagatcaaaggatcttcttgagatcctttttttctgcgcgtaatctgctgcttgcaaacaaaaaaaccaccgctaccagcggtggtttgtttgccggatcaagagctaccaactctttttccgaaggtaactggcttcagcagagcgcagataccaaatactgtccttctagtgtagccgtagttaggccaccacttcaagaactctgtagcaccgcctacatacctcgctctgctaatcctgttaccagtggctgctgccagtggcgataagtcgtgtcttaccgggttggactcaagacgatagttaccggataaggcgcagcggtcgggctgaacggggggttcgtgcacacagcccagcttggagcgaacgacctacaccgaactgagatacctacagcgtgagctatgagaaagcgccacgcttcccgaagggagaaaggcggacaggtatccggtaagcggcagggtcggaacaggagagcgcacgagggagcttccagggggaaacgcctggtatctttatagtcctgtcgggtttcgccacctctgacttgagcgtcgatttttgtgatgctcgtcaggggggcggagcctatggaaaaacgccagcaacgcggcctttttacggttcctggccttttgctggccttttgctcacatgttctttcctgcgttatcccctgattctgtggataaccgtattaccgcctttgagtgagctgataccgctcgccgcagccgaacgaccgagcgcagcgagtcagtgagcgaggaagcggaagagcgcccaatacgcaaaccgcctctccccgcgcgttggccgattcattaatgcagctggcacgacaggtttcccgactggaaagcgggcagtgagcgcaacgcaattaatgtgagttagctcactcattaggcaccccaggctttacactttatgcttccggctcgtatgttgtgtggaattgtgagcggataacaatttcacacaggaaacagctatgaccatgattacgccaagcttgcatgcctgcaggtcgactcgacgtacgtcctcgaagagaagggttaataacacattttttaacatttttaacacaaattttagttatttaaaaatttattaaaaaatttaaaataagaagaggaactctttaaataaatctaacttacaaaatttatgatttttaataagttttcaccaataaaaaatgtcataaaaatatgttaaaaagtatattatcaatattctctttatgataaataaaaagaaaaaaaaaataaaagttaagtgaaaatgagattgaagtgactttaggtgtgtataaatatatcaaccccgccaacaatttatttaatccaaatatattgaagtatattattccatagcctttatttatttatatatttattatataaaagctttatttgttctaggttgttcatgaaatatttttttggttttatctccgttgtaagaaaatcatgtgctttgtgtcgccactcactattgcagctttttcatgcattggtcagattgacggttgattgtatttttgttttttatggttttgtgttatgacttaagtcttcatctctttatctcttcatcaggtttgatggttacctaatatggtccatgggtacatgcatggttaaattaggtggccaactttgttgtgaacgatagaattttttttatattaagtaaactatttttatattatgaaataataataaaaaaaatattttatcattattaacaaaatcatattagttaatttgttaactctataataaaagaaatactgtaacattcacattacatggtaacatctttccaccctttcatttgttttttgtttgatgactttttttcttgtttaaatttatttcccttcttttaaatttggaatacattatcatcatatataaactaaaatactaaaaacaggattacacaaatgataaataataacacaaatatttataaatctagctgcaatatatttaaactagctatatcgatattgtaaaataaaactagctgcattgatactgataaaaaaatatcatgtgctttctggactgatgatgcagtatacttttgacattgcctttattttatttttcagaaaagctttcttagttctgggttcttcattatttgtttcccatctccattgtgaattgaatcatttgcttcgtgtcacaaatacaatttagntaggtacatgcattggtcagattcacggtttattatgtcatgacttaagttcatggtagtacattacctgccacgcatgcattatattggttagatttgataggcaaatttggttgtcaacaatataaatataaataatgtttttatattacgaaataacagtgatcaaaacaaacagttttatctttattaacaagattttgtttttgtttgatgacgttttttaatgtttacgctttcccccttcttttgaatttagaacactttatcatcataaaatcaaatactaaaaaaattacatatttcataaataataacacaaatatttttaaaaaatctgaaataataatgaacaatattacatattatcacgaaaattcattaataaaaatattatataaataaaatgtaatagtagttatatgtaggaaaaaagtactgcacgcataatatatacaaaaagattaaaatgaactattataaataataacactaaattaatggtgaatcatatcaaaataatgaaaaagtaaataaaatttgtaattaacttctatatgtattacacacacaaataataaataatagtaaaaaaaattatgataaatatttaccatctcataagatatttaaaataatgataaaaatatagattattttttatgcaactagctagccaaaaagagaacacgggtatatataaaaagagtacctttaaattctactgtacttcctttattcctgacgtttttatatcaagtggacatacgtgaagattttaattatcagtctaaatatttcattagcacttaatacttttctgttttattcctatcctataagtagtcccgattctcccaacattgcttattcacacaactaactaagaaagtcttccatagccccccaagcggccgcaaaccatggtggtcgtggacgatgttctcggtaatcatctatcaagatacgactatatgatctacgcactaatcaacaaccagcattgcgccaagtcgcaccttgcattcctgtcctggaaacacatcttttctctctttagcctcagcaagattctgcccttctaccgacttgacgaaaactggatgttcgaatcagcagccgaccttgagaaagaactagccaagctaatcaacccttactgtctggtgctgttcccagaagtctcggtggcaaccccacaacttatcagacgacatagagagctctgcagagcgtgttttgcacctgaactcactcatgtactctaccctcgccacagcagctttgcagacttcatattgggactgaataagggccaggctcttagttacatctacgacgccaccatctcgtatactgacaagaaagataagattctatgtaatcctggaaacatagatactctgttgactcaagtggaaacggttcatgttcacatacaccgagaacagtatcgtcggctgccgcgccacagacgtggtattcagaagtggctggaaaacacatgggtccacaaggataagagtatcagaaaggcctacaagcagtctggatcaatcatggatgatggcaagctcaaggagaaggataagtgatactaactaactgcagc

SEQ ID NO: 108 - DNA, 7836 bp, Artificial Sequence
  plasmid pFBAIN-YLPAAT2
catggccgttgcatccaagctcgtcttctacgtccgcgccgccatcgccgtggtcatctttgccgcctgtgccacctacggcgtgctggcgtccaccattctcaccgccatcggcaagcagggcctggcccaatggaccgttgccagagccttctactactcggtgcgcatcttcctgggtatcagcatcaagctgcgtagccggcaggtgaccggaaccgccggtctggatgcctccaagatccaggtcgccaacaccaccaagcccattgacgacatcaccaaacacctgccccgaccatgcattctgatttccaaccaccagaacgaaatggacattctggtgctcggtcgcatcttcccccagtactgctccgtcaccgccaaaaaggccctcaagtggtaccctctgctgggccagttcatggcgctgtccggcaccatcttcctggaccgaaaggaccgaaccaagtccgtgcagaccctcggcggcgccgtcaagaccatccagagcggcaacggaggcaagggccagagcgtcttcatgttccccgagggaacccgatcctactccaaggacgtcggcatcatgcccttcaagaagggctgtttccacctggcggtccagtcgggcgctcccattgtccccgtggtggtccagaacacctcccgaatgttttctttcggccgaggcaagctggacgccggagagatccttgtcgacgtcctgagccccattgagaccaagggtctggacgccagcaacgtcgacgctctcatggccaccacttataaggccatgtgcgagactgccgaccagattggctacgctggccagaagactcagtaggcggccgcaagtgtggatggggaagtgagtgcccggttctgtgtgcacaattggcaatccaagatggatggattcaacacagggatatagcgagctacgtggtggtgcgaggatatagcaacggatatttatgtttgacacttgagaatgtacgatacaagcactgtccaagtacaatactaaacatactgtacatactcatactcgtacccgggcaacggtttcacttgagtgcagtggctagtgctcttactcgtacagtgtgcaatactgcgtatcatagtctttgatgtatatcgtattcattcatgttagttgcgtacgagccggaagcataaagtgtaaagcctggggtgcctaatgagtgagctaactcacattaattgcgttgcgctcactgcccgctttccagtcgggaaacctgtcgtgccagctgcattaatgaatcggccaacgcgcggggagaggcggtttgcgtattgggcgctcttccgcttcctcgctcactgactcgctgcgctcggtcgttcggctgcggcgagcggtatcagctcactcaaaggcggtaatacggttatccacagaatcaggggataacgcaggaaagaacatgtgagcaaaaggccagcaaaaggccaggaaccgtaaaaaggccgcgttgctggcgtttttccataggctccgcccccctgacgagcatcacaaaaatcgacgctcaagtcagaggtggcgaaacccgacaggactataaagataccaggcgtttccccctggaagctccctcgtgcgctctcctgttccgaccctgccgcttaccggatacctgtccgcctttctcccttcgggaagcgtggcgctttctcatagctcacgctgtaggtatctcagttcggtgtaggtcgttcgctccaagctgggctgtgtgcacgaaccccccgttcagcccgaccgctgcgccttatccggtaactatcgtcttgagtccaacccggtaagacacgacttatcgccactggcagcagccactggtaacaggattagcagagcgaggtatgtaggcggtgctacagagttcttgaagtggtggcctaactacggctacactagaaggacagtatttggtatctgcgctctgctgaagccagttaccttcggaaaaagagttggtagctcttgatccggcaaacaaaccaccgctggtagcggtggtttttttgtttgcaagcagcagattacgcgcagaaaaaaaggatctcaagaagatcctttgatcttttctacggggtctgacgctcagtggaacgaaaactcacgttaagggattttggtcatgagattatcaaaaaggatcttcacctagatccttttaaattaaaaatgaagttttaaatcaatctaaagtatatatgagtaaacttggtctgacagttaccaatgcttaatcagtgaggcacctatctcagcgatctgtctatttcgttcatccatagttgcctgactccccgtcgtgtagataactacgatacgggagggcttaccatctggccccagtgctgcaatgataccgcgagacccacgctcaccggctccagatttatcagcaataaaccagccagccggaagggccgagcgcagaagtggtcctgcaactttatccgcctccatccagtctattaattgttgccgggaagctagagtaagtagttcgccagttaatagtttgcgcaacgttgttgccattgctacaggcatcgtggtgtcacgctcgtcgtttggtatggcttcattcagctccggttcccaacgatcaaggcgagttacatgatcccccatgttgtgcaaaaaagcggttagctccttcggtcctccgatcgttgtcagaagtaagttggccgcagtgttatcactcatggttatggcagcactgcataattctcttactgtcatgccatccgtaagatgcttttctgtgactggtgagtactcaaccaagtcattctgagaatagtgtatgcggcgaccgagttgctcttgcccggcgtcaatacgggataataccgcgccacatagcagaactttaaaagtgctcatcattggaaaacgttcttcggggcgaaaactctcaaggatcttaccgctgttgagatccagttcgatgtaacccactcgtgcacccaactgatcttcagcatcttttactttcaccagcgtttctgggtgagcaaaaacaggaaggcaaaatgccgcaaaaaagggaataagggcgacacggaaatgttgaatactcatactcttcctttttcaatattattgaagcatttatcagggttattgtctcatgagcggatacatatttgaatgtatttagaaaaataaacaaataggggttccgcgcacatttccccgaaaagtgccacctgacgcgccctgtagcggcgcattaagcgcggcgggtgtggtggttacgcgcagcgtgaccgctacacttgccagcgccctagcgcccgctcctttcgctttcttcccttcctttctcgccacgttcgccggctttccccgtcaagctctaaatcgggggctccctttagggttccgatttagtgctttacggcacctcgaccccaaaaaacttgattagggtgatggttcacgtagtgggccatcgccctgatagacggtttttcgccctttgacgttggagtccacgttctttaatagtggactcttgttccaaactggaacaacactcaaccctatctcggtctattcttttgatttataagggattttgccgatttcggcctattggttaaaaaatgagctgatttaacaaaaatttaacgcgaattttaacaaaatattaacgcttacaatttccattcgccattcaggctgcgcaactgttgggaagggcgatcggtgcgggcctcttcgctattacgccagctggcgaaagggggatgtgctgcaaggcgattaagttgggtaacgccagggttttcccagtcacgacgttgtaaaacgacggccagtgaattgtaatacgactcactatagggcgaattgggtaccgggccccccctcgaggtcgatggtgtcgataagcttgatatcgaattcatgtcacacaaaccgatcttcgcctcaaggaaacctaattctacatccgagagactgccgagatccagtctacactgattaattttcgggccaataatttaaaaaaatcgtgttatataatattatatgtattatatatatacatcatgatgatactgacagtcatgtcccattgctaaatagacagactccatctgccgcctccaactgatgttctcaatatttaaggggtcatctcgcattgtttaataataaacagactccatctaccgcctccaaatgatgttctcaaaatatattgtatgaacttatttttattacttagtattattagacaacttacttgctttatgaaaaacacttcctatttaggaaacaatttataatggcagttcgttcatttaacaatttatgtagaataaatgttataaatgcgtatgggaaatcttaaatatggatagcataaatgatatctgcattgcctaattcgaaatcaacagcaacgaaaaaaatcccttgtacaacataaatagtcatcgagaaatatcaactatcaaagaacagctattcacacgttactattgagattattattggacgagaatcacacactcaactgtctttctctcttctagaaatacaggtacaagtatgtactattctcattgttcatacttctagtcatttcatcccacatattccttggatttctctccaatgaatgacattctatcttgcaaattcaacaattataataagatataccaaagtagcggtatagtggcaatcaaaaagcttctctggtgtgcttctcgtatttatttttattctaatgatccattaaaggtatatatttatttcttgttatataatccttttgtttattacatgggctggatacataaaggtattttgatttaattttttgcttaaattcaatcccccctcgttcagtgtcaactgtaatggtaggaaattaccatacttttgaagaagcaaaaaaaatgaaagaaaaaaaaaatcgtatttccaggttagacgttccgcagaatctagaatgcggtatgcggtacattgttcttcgaacgtaaaagttgcgctccctgagatattgtacatttttgcttttacaagtacaagtacatcgtacaactatgtactactgttgatgcatccacaacagtttgttttgtttttttttgttttttttttttctaatgattcattaccgctatgtatacctacttgtacttgtagtaagccgggttattggcgttcaattaatcatagacttatgaatctgcacggtgtgcgctgcgagttacttttagcttatgcatgctacttgggtgtaatattgggatctgttcggaaatcaacggatgctcaatcgatttcgacagtaattaattaagtcatacacaagtcagctttcttcgagcctcatataagtataagtagttcaacgtattagcactgtacccagcatctccgtatcgagaaacacaacaacatgccccattggacagatcatgcggatacacaggttgtgcagtatcatacatactcgatcagacaggtcgtctgaccatcatacaagctgaacaagcgctccatacttgcacgctctctatatacacagttaaattacatatccatagtctaacctctaacagttaatcttctggtaagcctcccagccagccttctggtatcgcttggcctcctcaataggatctcggttctggccgtacagacctcggccgacaattatgatatccgttccggtagacatgacatcctcaacagttcggtactgctgtccgagagcgtctcccttgtcgtcaagacccaccccgggggtcagaataagccagtcctcagagtcgcccttaggtcggttctgggcaatgaagccaaccacaaactcggggtcggatcgggcaagctcaatggtctgcttggagtactcgccagtggccagagagcccttgcaagacagctcggccagcatgagcagacctctggccagcttctcgttgggagaggggactaggaactccttgtactgggagttctcgtagtcagagacgtcctccttcttctgttcagagacagtttcctcggcaccagctcgcaggccagcaatgattccggttccgggtacaccgtgggcgttggtgatatcggaccactcggcgattcggtgacaccggtactggtgcttgacagtgttgccaatatctgcgaactttctgtcctcgaacaggaagaaaccgtgcttaagagcaagttccttgagggggagcacagtgccggcgtaggtgaagtcgtcaatgatgtcgatatgggttttgatcatgcacacataaggtccgaccttatcggcaagctcaatgagctccttggtggtggtaacatccagagaagcacacaggttggttttcttggctgccacgagcttgagcactcgagcggcaaaggcggacttgtggacgttagctcgagcttcgtaggagggcattttggtggtgaagaggagactgaaataaatttagtctgcagaactttttatcggaaccttatctggggcagtgaagtatatgttatggtaatagttacgagttagttgaacttatagatagactggactatacggctatcggtccaaattagaaagaacgtcaatggctctctgggcgtcgcctttgccgacaaaaatgtgatcatgatgaaagccagcaatgacgttgcagctgatattgttgtcggccaaccgcgccgaaaacgcagctgtcagacccacagcctccaacgaagaatgtatcgtcaaagtgatccaagcacactcatagttggagtcgtactccaaaggcggcaatgacgagtcagacagatactcgtcgaaaacagtgtacgcagatctactatagaggaacatttaaattgccccggagaagacggccaggccgcctagatgacaaattcaacaactcacagctgactttctgccattgccactaggggggggcctttttatatggccaagccaagctctccacgtcggttgggctgcacccaacaataaatgggtagggttgcaccaacaaagggatgggatggggggtagaagatacgaggataacggggctcaatggcacaaataagaacgaatactgccattaagactcgtgatccagcgactgacaccattgcatcatctaagggcctcaaaactacctcggaactgctgcgctgatctggacaccacagaggttccgagcactttaggttgcaccaaatgtcccaccaggtgcaggcagaaaacgctggaacagcgtgtacagtttgtcttaacaaaaagtgagggcgctgaggtcgagcagggtggtgtgacttgttatagcctttagagctgcgaaagcgcgtatggatttggctcatcaggccagattgagggtctgtggacacatgtcatgttagtgtacttcaatcgccccctggatatagccccgacaataggccgtggcctcatttttttgccttccgcacatttccattgctcggtacccacaccttgcttctcctgcacttgccaaccttaatactggtttacattgaccaacatcttacaagcggggggcttgtctagggtatatataaacagtggctctcccaatcggttgccagtctcttttttcctttctttccccacagattcgaaatctaaactacacatcacagaattccgagccgtgagtatccacgacaagatcagtgtcgagacgacgcgttttgtgtaatgacacaatccgaaagtcgctagcaacacacactctctacacaaactaacccagctctggtac

SEQ ID NO: 109 - DNA, 4553 bp, Artificial Sequence
  plasmid pKR1240
gtacgtctagaggatcccccgggctgcaggaattcactggccgtcgttttacaacgtcgtgactgggaaaaccctggcgttacccaacttaatcgccttgcagcacatccccctttcgccagctggcgtaatagcgaagaggcccgcaccgatcgcccttcccaacagttgcgcagcctgaatggcgaatggcgcctgatgcggtattttctccttacgcatctgtgcggtatttcacaccgcatatggtgcactctcagtacaatctgctctgatgccgcatagttaagccagccccgacacccgccaacacccgctgacgcgccctgacgggcttgtctgctcccggcatccgcttacagacaagctgtgaccgtctccgggagctgcatgtgtcagaggttttcaccgtcatcaccgaaacgcgcgagacgaaagggcctcgtgatacgcctatttttataggttaatgtcatgataataatggtttcttagacgtcaggtggcacttttcggggaaatgtgcgcggaacccctatttgtttatttttctaaatacattcaaatatgtatccgctcatgagacaataaccctgataaatgcttcaataatattgaaaaaggaagagtatgagtattcaacatttccgtgtcgcccttattcccttttttgcggcattttgccttcctgtttttgctcacccagaaacgctggtgaaagtaaaagatgctgaagatcagttgggtgcacgagtgggttacatcgaactggatctcaacagcggtaagatccttgagagttttcgccccgaagaacgttttccaatgatgagcacttttaaagttctgctatgtggcgcggtattatcccgtattgacgccgggcaagagcaactcggtcgccgcatacactattctcagaatgacttggttgagtactcaccagtcacagaaaagcatcttacggatggcatgacagtaagagaattatgcagtgctgccataaccatgagtgataacactgcggccaacttacttctgacaacgatcggaggaccgaaggagctaaccgcttttttgcacaacatgggggatcatgtaactcgccttgatcgttgggaaccggagctgaatgaagccataccaaacgacgagcgtgacaccacgatgcctgtagcaatggcaacaacgttgcgcaaactattaactggcgaactacttactctagcttcccggcaacaattaatagactggatggaggcggataaagttgcaggaccacttctgcgctcggcccttccggctggctggtttattgctgataaatctggagccggtgagcgtgggtctcgcggtatcattgcagcactggggccagatggtaagccctcccgtatcgtagttatctacacgacggggagtcaggcaactatggatgaacgaaatagacagatcgctgagataggtgcctcactgattaagcattggtaactgtcagaccaagtttactcatatatactttagattgatttaaaacttcatttttaatttaaaaggatctaggtgaagatcctttttgataatctcatgaccaaaatcccttaacgtgagttttcgttccactgagcgtcagaccccgtagaaaagatcaaaggatcttcttgagatcctttttttctgcgcgtaatctgctgcttgcaaacaaaaaaaccaccgctaccagcggtggtttgtttgccggatcaagagctaccaactctttttccgaaggtaactggcttcagcagagcgcagataccaaatactgtccttctagtgtagccgtagttaggccaccacttcaagaactctgtagcaccgcctacatacctcgctctgctaatcctgttaccagtggctgctgccagtggcgataagtcgtgtcttaccgggttggactcaagacgatagttaccggataaggcgcagcggtcgggctgaacggggggttcgtgcacacagcccagcttggagcgaacgacctacaccgaactgagatacctacagcgtgagctatgagaaagcgccacgcttcccgaagggagaaaggcggacaggtatccggtaagcggcagggtcggaacaggagagcgcacgagggagcttccagggggaaacgcctggtatctttatagtcctgtcgggtttcgccacctctgacttgagcgtcgatttttgtgatgctcgtcaggggggcggagcctatggaaaaacgccagcaacgcggcctttttacggttcctggccttttgctggccttttgctcacatgttctttcctgcgttatcccctgattctgtggataaccgtattaccgcctttgagtgagctgataccgctcgccgcagccgaacgaccgagcgcagcgagtcagtgagcgaggaagcggaagagcgcccaatacgcaaaccgcctctccccgcgcgttggccgattcattaatgcagctggcacgacaggtttcccgactggaaagcgggcagtgagcgcaacgcaattaatgtgagttagctcactcattaggcaccccaggctttacactttatgcttccggctcgtatgttgtgtggaattgtgagcggataacaatttcacacaggaaacagctatgaccatgattacgccaagcttgcatgcctgcaggctagcctaagtacgtactcaaaatgccaacaaataaaaaaaaagttgctttaataatgccaaaacaaattaataaaacacttacaacaccggattttttttaattaaaatgtgccatttaggataaatagttaatatttttaataattatttaaaaagccgtatctactaaaatgatttttatttggttgaaaatattaatatgtttaaatcaacacaatctatcaaaattaaactaaaaaaaaaataagtgtacgtggttaacattagtacagtaatataagaggaaaatgagaaattaagaaattgaaagcgagtctaatttttaaattatgaacctgcatatataaaaggaaagaaagaatccaggaagaaaagaaatgaaaccatgcatggtcccctcgtcatcacgagtttctgccatttgcaatagaaacactgaaacacctttctctttgtcacttaattgagatgccgaagccacctcacaccatgaacttcatgaggtgtagcacccaaggcttccatagccatgcatactgaagaatgtctcaagctcagcaccctacttctgtgacgtgtccctcattcaccttcctctcttccctataaataaccacgcctcaggttctccgcttcacaactcaaacattctctccattggtccttaaacactcatcagtcatcaccgcggccgcaaaccatggccgttgcatccaagctcgtcttctacgtccgcgccgccatcgccgtggtcatctttgccgcctgtgccacctacggcgtgctggcgtccaccattctcaccgccatcggcaagcagggcctggcccaatggaccgttgccagagccttctactactcggtgcgcatcttcctgggtatcagcatcaagctgcgtagccggcaggtgaccggaaccgccggtctggatgcctccaagatccaggtcgccaacaccaccaagcccattgacgacatcaccaaacacctgccccgaccatgcattctgatttccaaccaccagaacgaaatggacattctggtgctcggtcgcatcttcccccagtactgctccgtcaccgccaaaaaggccctcaagtggtaccctctgctgggccagttcatggcgctgtccggcaccatcttcctggaccgaaaggaccgaaccaagtccgtgcagaccctcggcggcgccgtcaagaccatccagagcggcaacggaggcaagggccagagcgtcttcatgttccccgagggaacccgatcctactccaaggacgtcggcatcatgcccttcaagaagggctgtttccacctggcggtccagtcgggcgctcccattgtccccgtggtggtccagaacacctcccgaatgttttctttcggccgaggcaagctggacgccggagagatccttgtcgacgtcctgagccccattgagaccaagggtctggacgccagcaacgtcgacgctctcatggccaccacttataaggccatgtgcgagactgccgaccagattggctacgctggccagaagactcagtaggcggccgcaagtgtggatggggaagtgagtgcccggttctgtgtgcacaattggcaatccaagatggatggattcaacacagggatatagcgagctacgtggtggtgcgaggatatagcaacggatatttatgtttgacacttgagaatgtacgatacaagcactgtccaagtacaatactaaacatactgtacatactcatactcgtacccgggcaacggtttcacttgagtgcagtggctagtgctcttactcgtacagtgtgcaatactgcgtatcatagtctttgatgtatatcgtattcattcatgttagttgc

SEQ ID NO: 110 - DNA, 6114 bp, Artificial Sequence
  plasmid pKR1243
  misc_feature (4340)..(4340): n is a, c, g, or t
ggccgcgacacaagtgtgagagtactaaataaatgctttggttgtacgaaatcattacactaaataaaataatcaaagcttatatatgccttccgctaaggccgaatgcaaagaaattggttctttctcgttatcttttgccacttttactagtacgtattaattactacttaatcatctttgtttacggctcattatatccggtctagaggatccaaggccgcgaagttaaaagcaatgttgtcacttgtcgtactaacacatgatgtgatagtttatgctagctagctataacataagctgtctctgagtgtgttgtatattaataaagatcatcactggtgaatggtgatcgtgtacgtaccctacttagtaggcaatggaagcacttagagtgtgctttgtgcatggccttgcctctgttttgagacttttgtaatgttttcgagtttaaatctttgcctttgcgtacgtgggcggatcccccgggctgcaggaattcactggccgtcgttttacaacgtcgtgactgggaaaaccctggcgttacccaacttaatcgccttgcagcacatccccctttcgccagctggcgtaatagcgaagaggcccgcaccgatcgcccttcccaacagttgcgcagcctgaatggcgaatggcgcctgatgcggtattttctccttacgcatctgtgcggtatttcacaccgcatatggtgcactctcagtacaatctgctctgatgccgcatagttaagccagccccgacacccgccaacacccgctgacgcgccctgacgggcttgtctgctcccggcatccgcttacagacaagctgtgaccgtctccgggagctgcatgtgtcagaggttttcaccgtcatcaccgaaacgcgcgagacgaaagggcctcgtgatacgcctatttttataggttaatgtcatgataataatggtttcttagacgtcaggtggcacttttcggggaaatgtgcgcggaacccctatttgtttatttttctaaatacattcaaatatgtatccgctcatgagacaataaccctgataaatgcttcaataatattgaaaaaggaagagtatgagtattcaacatttccgtgtcgcccttattcccttttttgcggcattttgccttcctgtttttgctcacccagaaacgctggtgaaagtaaaagatgctgaagatcagttgggtgcacgagtgggttacatcgaactggatctcaacagcggtaagatccttgagagttttcgccccgaagaacgttttccaatgatgagcacttttaaagttctgctatgtggcgcggtattatcccgtattgacgccgggcaagagcaactcggtcgccgcatacactattctcagaatgacttggttgagtactcaccagtcacagaaaagcatcttacggatggcatgacagtaagagaattatgcagtgctgccataaccatgagtgataacactgcggccaacttacttctgacaacgatcggaggaccgaaggagctaaccgcttttttgcacaacatgggggatcatgtaactcgccttgatcgttgggaaccggagctgaatgaagccataccaaacgacgagcgtgacaccacgatgcctgtagcaatggcaacaacgttgcgcaaactattaactggcgaactacttactctagcttcccggcaacaattaatagactggatggaggcggataaagttgcaggaccacttctgcgctcggcccttccggctggctggtttattgctgataaatctggagccggtgagcgtgggtctcgcggtatcattgcagcactggggccagatggtaagccctcccgtatcgtagttatctacacgacggggagtcaggcaactatggatgaacgaaatagacagatcgctgagataggtgcctcactgattaagcattggtaactgtcagaccaagtttactcatatatactttagattgatttaaaacttcatttttaatttaaaaggatctaggtgaagatcctttttgataatctcatgaccaaaatcccttaacgtgagttttcgttccactgagcgtcagaccccgtagaaaagatcaaaggatcttcttgagatcctttttttctgcgcgtaatctgctgcttgcaaacaaaaaaaccaccgctaccagcggtggtttgtttgccggatcaagagctaccaactctttttccgaaggtaactggcttcagcagagcgcagataccaaatactgtccttctagtgtagccgtagttaggccaccacttcaagaactctgtagcaccgcctacatacctcgctctgctaatcctgttaccagtggctgctgccagtggcgataagtcgtgtcttaccgggttggactcaagacgatagttaccggataaggcgcagcggtcgggctgaacggggggttcgtgcacacagcccagcttggagcgaacgacctacaccgaactgagatacctacagcgtgagctatgagaaagcgccacgcttcccgaagggagaaaggcggacaggtatccggtaagcggcagggtcggaacaggagagcgcacgagggagcttccagggggaaacgcctggtatctttatagtcctgtcgggtttcgccacctctgacttgagcgtcgatttttgtgatgctcgtcaggggggcggagcctatggaaaaacgccagcaacgcggcctttttacggttcctggccttttgctggccttttgctcacatgttctttcctgcgttatcccctgattctgtggataaccgtattaccgcctttgagtgagctgataccgctcgccgcagccgaacgaccgagcgcagcgagtcagtgagcgaggaagcggaagagcgcccaatacgcaaaccgcctctccccgcgcgttggccgattcattaatgcagctggcacgacaggtttcccgactggaaagcgggcagtgagcgcaacgcaattaatgtgagttagctcactcattaggcaccccaggctttacactttatgcttccggctcgtatgttgtgtggaattgtgagcggataacaatttcacacaggaaacagctatgaccatgattacgccaagcttgcatgcctgcaggtcgactcgacgtacgtcctcgaagagaagggttaataacacattttttaacatttttaacacaaattttagttatttaaaaatttattaaaaaatttaaaataagaagaggaactctttaaataaatctaacttacaaaatttatgatttttaataagttttcaccaataaaaaatgtcataaaaatatgttaaaaagtatattatcaatattctctttatgataaataaaaagaaaaaaaaaataaaagttaagtgaaaatgagattgaagtgactttaggtgtgtataaatatatcaaccccgccaacaatttatttaatccaaatatattgaagtatattattccatagcctttatttatttatatatttattatataaaagctttatttgttctaggttgttcatgaaatatttttttggttttatctccgttgtaagaaaatcatgtgctttgtgtcgccactcactattgcagctttttcatgcattggtcagattgacggttgattgtatttttgttttttatggttttgtgttatgacttaagtcttcatctctttatctcttcatcaggtttgatggttacctaatatggtccatgggtacatgcatggttaaattaggtggccaactttgttgtgaacgatagaattttttttatattaagtaaactatttttatattatgaaataataataaaaaaaatattttatcattattaacaaaatcatattagttaatttgttaactctataataaaagaaatactgtaacattcacattacatggtaacatctttccaccctttcatttgttttttgtttgatgactttttttcttgtttaaatttatttcccttcttttaaatttggaatacattatcatcatatataaactaaaatactaaaaacaggattacacaaatgataaataataacacaaatatttataaatctagctgcaatatatttaaactagctatatcgatattgtaaaataaaactagctgcattgatactgataaaaaaatatcatgtgctttctggactgatgatgcagtatacttttgacattgcctttattttatttttcagaaaagctttcttagttctgggttcttcattatttgtttcccatctccattgtgaattgaatcatttgcttcgtgtcacaaatacaatttagntaggtacatgcattggtcagattcacggtttattatgtcatgacttaagttcatggtagtacattacctgccacgcatgcattatattggttagatttgataggcaaatttggttgtcaacaatataaatataaataatgtttttatattacgaaataacagtgatcaaaacaaacagttttatctttattaacaagattttgtttttgtttgatgacgttttttaatgtttacgctttcccccttcttttgaatttagaacactttatcatcataaaatcaaatactaaaaaaattacatatttcataaataataacacaaatatttttaaaaaatctgaaataataatgaacaatattacatattatcacgaaaattcattaataaaaatattatataaataaaatgtaatagtagttatatgtaggaaaaaagtactgcacgcataatatatacaaaaagattaaaatgaactattataaataataacactaaattaatggtgaatcatatcaaaataatgaaaaagtaaataaaatttgtaattaacttctatatgtattacacacacaaataataaataatagtaaaaaaaattatgataaatatttaccatctcataagatatttaaaataatgataaaaatatagattattttttatgcaactagctagccaaaaagagaacacgggtatatataaaaagagtacctttaaattctactgtacttcctttattcctgacgtttttatatcaagtggacatacgtgaagattttaattatcagtctaaatatttcattagcacttaatacttttctgttttattcctatcctataagtagtcccgattctcccaacattgcttattcacacaactaactaagaaagtcttccatagccccccaagcggccgcaaaccatggccgttgcatccaagctcgtcttctacgtccgcgccgccatcgccgtggtcatctttgccgcctgtgccacctacggcgtgctggcgtccaccattctcaccgccatcggcaagcagggcctggcccaatggaccgttgccagagccttctactactcggtgcgcatcttcctgggtatcagcatcaagctgcgtagccggcaggtgaccggaaccgccggtctggatgcctccaagatccaggtcgccaacaccaccaagcccattgacgacatcaccaaacacctgccccgaccatgcattctgatttccaaccaccagaacgaaatggacattctggtgctcggtcgcatcttcccccagtactgctccgtcaccgccaaaaaggccctcaagtggtaccctctgctgggccagttcatggcgctgtccggcaccatcttcctggaccgaaaggaccgaaccaagtccgtgcagaccctcggcggcgccgtcaagaccatccagagcggcaacggaggcaagggccagagcgtcttcatgttccccgagggaacccgatcctactccaaggacgtcggcatcatgcccttcaagaagggctgtttccacctggcggtccagtcgggcgctcccattgtccccgtggtggtccagaacacctcccgaatgttttctttcggccgaggcaagctggacgccggagagatccttgtcgacgtcctgagccccattgagaccaagggtctggacgccagcaacgtcgacgctctcatggccaccacttataaggccatgtgcgagactgccgaccagattggctacgctggccagaagactcagtaggc

SEQ ID NO: 111 - DNA, 8229 bp, Artificial Sequence
  plasmid pFBAIn-YLPAT3
ggccgcaagtgtggatggggaagtgagtgcccggttctgtgtgcacaattggcaatccaagatggatggattcaacacagggatatagcgagctacgtggtggtgcgaggatatagcaacggatatttatgtttgacacttgagaatgtacgatacaagcactgtccaagtacaatactaaacatactgtacatactcatactcgtacccgggcaacggtttcacttgagtgcagtggctagtgctcttactcgtacagtgtgcaatactgcgtatcatagtctttgatgtatatcgtattcattcatgttagttgcgtacgagccggaagcataaagtgtaaagcctggggtgcctaatgagtgagctaactcacattaattgcgttgcgctcactgcccgctttccagtcgggaaacctgtcgtgccagctgcattaatgaatcggccaacgcgcggggagaggcggtttgcgtattgggcgctcttccgcttcctcgctcactgactcgctgcgctcggtcgttcggctgcggcgagcggtatcagctcactcaaaggcggtaatacggttatccacagaatcaggggataacgcaggaaagaacatgtgagcaaaaggccagcaaaaggccaggaaccgtaaaaaggccgcgttgctggcgtttttccataggctccgcccccctgacgagcatcacaaaaatcgacgctcaagtcagaggtggcgaaacccgacaggactataaagataccaggcgtttccccctggaagctccctcgtgcgctctcctgttccgaccctgccgcttaccggatacctgtccgcctttctcccttcgggaagcgtggcgctttctcatagctcacgctgtaggtatctcagttcggtgtaggtcgttcgctccaagctgggctgtgtgcacgaaccccccgttcagcccgaccgctgcgccttatccggtaactatcgtcttgagtccaacccggtaagacacgacttatcgccactggcagcagccactggtaacaggattagcagagcgaggtatgtaggcggtgctacagagttcttgaagtggtggcctaactacggctacactagaaggacagtatttggtatctgcgctctgctgaagccagttaccttcggaaaaagagttggtagctcttgatccggcaaacaaaccaccgctggtagcggtggtttttttgtttgcaagcagcagattacgcgcagaaaaaaaggatctcaagaagatcctttgatcttttctacggggtctgacgctcagtggaacgaaaactcacgttaagggattttggtcatgagattatcaaaaaggatcttcacctagatccttttaaattaaaaatgaagttttaaatcaatctaaagtatatatgagtaaacttggtctgacagttaccaatgcttaatcagtgaggcacctatctcagcgatctgtctatttcgttcatccatagttgcctgactccccgtcgtgtagataactacgatacgggagggcttaccatctggccccagtgctgcaatgataccgcgagacccacgctcaccggctccagatttatcagcaataaaccagccagccggaagggccgagcgcagaagtggtcctgcaactttatccgcctccatccagtctattaattgttgccgggaagctagagtaagtagttcgccagttaatagtttgcgcaacgttgttgccattgctacaggcatcgtggtgtcacgctcgtcgtttggtatggcttcattcagctccggttcccaacgatcaaggcgagttacatgatcccccatgttgtgcaaaaaagcggttagctccttcggtcctccgatcgttgtcagaagtaagttggccgcagtgttatcactcatggttatggcagcactgcataattctcttactgtcatgccatccgtaagatgcttttctgtgactggtgagtactcaaccaagtcattctgagaatagtgtatgcggcgaccgagttgctcttgcccggcgtcaatacgggataataccgcgccacatagcagaactttaaaagtgctcatcattggaaaacgttcttcggggcgaaaactctcaaggatcttaccgctgttgagatccagttcgatgtaacccactcgtgcacccaactgatcttcagcatcttttactttcaccagcgtttctgggtgagcaaaaacaggaaggcaaaatgccgcaaaaaagggaataagggcgacacggaaatgttgaatactcatactcttcctttttcaatattattgaagcatttatcagggttattgtctcatgagcggatacatatttgaatgtatttagaaaaataaacaaataggggttccgcgcacatttccccgaaaagtgccacctgacgcgccctgtagcggcgcattaagcgcggcgggtgtggtggttacgcgcagcgtgaccgctacacttgccagcgccctagcgcccgctcctttcgctttcttcccttcctttctcgccacgttcgccggctttccccgtcaagctctaaatcgggggctccctttagggttccgatttagtgctttacggcacctcgaccccaaaaaacttgattagggtgatggttcacgtagtgggccatcgccctgatagacggtttttcgccctttgacgttggagtccacgttctttaatagtggactcttgttccaaactggaacaacactcaaccctatctcggtctattcttttgatttataagggattttgccgatttcggcctattggttaaaaaatgagctgatttaacaaaaatttaacgcgaattttaacaaaatattaacgcttacaatttccattcgccattcaggctgcgcaactgttgggaagggcgatcggtgcgggcctcttcgctattacgccagctggcgaaagggggatgtgctgcaaggcgattaagttgggtaacgccagggttttcccagtcacgacgttgtaaaacgacggccagtgaattgtaatacgactcactatagggcgaattgggtaccgggccccccctcgaggtcgatggtgtcgataagcttgatatcgaattcatgtcacacaaaccgatcttcgcctcaaggaaacctaattctacatccgagagactgccgagatccagtctacactgattaattttcgggccaataatttaaaaaaatcgtgttatataatattatatgtattatatatatacatcatgatgatactgacagtcatgtcccattgctaaatagacagactccatctgccgcctccaactgatgttctcaatatttaaggggtcatctcgcattgtttaataataaacagactccatctaccgcctccaaatgatgttctcaaaatatattgtatgaacttatttttattacttagtattattagacaacttacttgctttatgaaaaacacttcctatttaggaaacaatttataatggcagttcgttcatttaacaatttatgtagaataaatgttataaatgcgtatgggaaatcttaaatatggatagcataaatgatatctgcattgcctaattcgaaatcaacagcaacgaaaaaaatcccttgtacaacataaatagtcatcgagaaatatcaactatcaaagaacagctattcacacgttactattgagattattattggacgagaatcacacactcaactgtctttctctcttctagaaatacaggtacaagtatgtactattctcattgttcatacttctagtcatttcatcccacatattccttggatttctctccaatgaatgacattctatcttgcaaattcaacaattataataagatataccaaagtagcggtatagtggcaatcaaaaagcttctctggtgtgcttctcgtatttatttttattctaatgatccattaaaggtatatatttatttcttgttatataatccttttgtttattacatgggctggatacataaaggtattttgatttaattttttgcttaaattcaatcccccctcgttcagtgtcaactgtaatggtaggaaattaccatacttttgaagaagcaaaaaaaatgaaagaaaaaaaaaatcgtatttccaggttagacgttccgcagaatctagaatgcggtatgcggtacattgttcttcgaacgtaaaagttgcgctccctgagatattgtacatttttgcttttacaagtacaagtacatcgtacaactatgtactactgttgatgcatccacaacagtttgttttgtttttttttgttttttttttttctaatgattcattaccgctatgtatacctacttgtacttgtagtaagccgggttattggcgttcaattaatcatagacttatgaatctgcacggtgtgcgctgcgagttacttttagcttatgcatgctacttgggtgtaatattgggatctgttcggaaatcaacggatgctcaatcgatttcgacagtaattaattaagtcatacacaagtcagctttcttcgagcctcatataagtataagtagttcaacgtattagcactgtacccagcatctccgtatcgagaaacacaacaacatgccccattggacagatcatgcggatacacaggttgtgcagtatcatacatactcgatcagacaggtcgtctgaccatcatacaagctgaacaagcgctccatacttgcacgctctctatatacacagttaaattacatatccatagtctaacctctaacagttaatcttctggtaagcctcccagccagccttctggtatcgcttggcctcctcaataggatctcggttctggccgtacagacctcggccgacaattatgatatccgttccggtagacatgacatcctcaacagttcggtactgctgtccgagagcgtctcccttgtcgtcaagacccaccccgggggtcagaataagccagtcctcagagtcgcccttaggtcggttctgggcaatgaagccaaccacaaactcggggtcggatcgggcaagctcaatggtctgcttggagtactcgccagtggccagagagcccttgcaagacagctcggccagcatgagcagacctctggccagcttctcgttgggagaggggactaggaactccttgtactgggagttctcgtagtcagagacgtcctccttcttctgttcagagacagtttcctcggcaccagctcgcaggccagcaatgattccggttccgggtacaccgtgggcgttggtgatatcggaccactcggcgattcggtgacaccggtactggtgcttgacagtgttgccaatatctgcgaactttctgtcctcgaacaggaagaaaccgtgcttaagagcaagttccttgagggggagcacagtgccggcgtaggtgaagtcgtcaatgatgtcgatatgggttttgatcatgcacacataaggtccgaccttatcggcaagctcaatgagctccttggtggtggtaacatccagagaagcacacaggttggttttcttggctgccacgagcttgagcactcgagcggcaaaggcggacttgtggacgttagctcgagcttcgtaggagggcattttggtggtgaagaggagactgaaataaatttagtctgcagaactttttatcggaaccttatctggggcagtgaagtatatgttatggtaatagttacgagttagttgaacttatagatagactggactatacggctatcggtccaaattagaaagaacgtcaatggctctctgggcgtcgcctttgccgacaaaaatgtgatcatgatgaaagccagcaatgacgttgcagctgatattgttgtcggccaaccgcgccgaaaacgcagctgtcagacccacagcctccaacgaagaatgtatcgtcaaagtgatccaagcacactcatagttggagtcgtactccaaaggcggcaatgacgagtcagacagatactcgtcgaaaacagtgtacgcagatctactatagaggaacatttaaattgccccggagaagacggccaggccgcctagatgacaaattcaacaactcacagctgactttctgccattgccactaggggggggcctttttatatggccaagccaagctctccacgtcggttgggctgcacccaacaataaatgggtagggttgcaccaacaaagggatgggatggggggtagaagatacgaggataacggggctcaatggcacaaataagaacgaatactgccattaagactcgtgatccagcgactgacaccattgcatcatctaagggcctcaaaactacctcggaactgctgcgctgatctggacaccacagaggttccgagcactttaggttgcaccaaatgtcccaccaggtgcaggcagaaaacgctggaacagcgtgtacagtttgtcttaacaaaaagtgagggcgctgaggtcgagcagggtggtgtgacttgttatagcctttagagctgcgaaagcgcgtatggatttggctcatcaggccagattgagggtctgtggacacatgtcatgttagtgtacttcaatcgccccctggatatagccccgacaataggccgtggcctcatttttttgccttccgcacatttccattgctcggtacccacaccttgcttctcctgcacttgccaaccttaatactggtttacattgaccaacatcttacaagcggggggcttgtctagggtatatataaacagtggctctcccaatcggttgccagtctcttttttcctttctttccccacagattcgaaatctaaactacacatcacagaattccgagccgtgagtatccacgacaagatcagtgtcgagacgacgcgttttgtgtaatgacacaatccgaaagtcgctagcaacacacactctctacacaaactaacccagctctggtaccatggctactgcagaggctgtcaaggcctccggtgtggctggagagtcctcttctgcctcccagcgagtagcaaaatccgccccgtccacggaccccgtcattcctgtcgatattcctctggcagtccccaccaccaacaaggagctccctcctcctcgacactccaagccttcccaggtgcttcgaggtgtcattgctgttttttactttctgtgcgcctgcttatcgattgtactgactcaatggatcggctacccactcaaataccagtccaaaatggcctgggtggtctgggtagagtacaccaaacaacagttcatcgtggtgatgctgtgtcttgttcaggcactcactagcacagaaatgcgagtttcaggtgacgagactatgaagggtgtcttctccgtcgacggaaacggctacctgtcttccagattcgaagaaagagccattgtcatcgccaaccaccagctctatacagactggatctatctgtggtggtttgctctcaccagcggatttggcggttgcatctacatcctgctcaaaaagtctcttcgaagcattcccattttgggctcgggaatggccaattacaacttcatcttcctgtctcggaaatgggccgacgacgagcagaacatgaaggagcacttccagggtctcaacaagctgcaggcccccgtctggctcacaatgttccccgagggaacaaatacctcccacaatggtactaacaactccaacaagtttgctgctaagatcggagtcaagcccatgaagcatgtcttgttgccccgaactacaggtctgcggtttgccattgagaatctggctcaaactgtagactacctgtacgattgtactcttgcctacgaaggtgtgggccgaggagagtacggacaggacttttacacgcttggaaacgtgtttctgagaggccagggccctgtctatgtcaaagctcactggaccaagtttgtcatcaaggaaattccctacaaggacgaaaagaagtttgaaaagtggctgtatgatctgtggtacgacaaggaccagatgatggacaacttcattgagactggaaagtttttccctgataacgaggagtctgagaagattgccaagttgcagctggcccaccctttgcagggattgcaggtctttgtcattcctgctgctgctgcattgattttgagattgggatggaagtattggcagacgatctgaagttgttagtaagc

SEQ ID NO: 112 - DNA, 4946 bp, Artificial Sequence
  plasmid pKR1241
gtacgtctagaggatcccccgggctgcaggaattcactggccgtcgttttacaacgtcgtgactgggaaaaccctggcgttacccaacttaatcgccttgcagcacatccccctttcgccagctggcgtaatagcgaagaggcccgcaccgatcgcccttcccaacagttgcgcagcctgaatggcgaatggcgcctgatgcggtattttctccttacgcatctgtgcggtatttcacaccgcatatggtgcactctcagtacaatctgctctgatgccgcatagttaagccagccccgacacccgccaacacccgctgacgcgccctgacgggcttgtctgctcccggcatccgcttacagacaagctgtgaccgtctccgggagctgcatgtgtcagaggttttcaccgtcatcaccgaaacgcgcgagacgaaagggcctcgtgatacgcctatttttataggttaatgtcatgataataatggtttcttagacgtcaggtggcacttttcggggaaatgtgcgcggaacccctatttgtttatttttctaaatacattcaaatatgtatccgctcatgagacaataaccctgataaatgcttcaataatattgaaaaaggaagagtatgagtattcaacatttccgtgtcgcccttattcccttttttgcggcattttgccttcctgtttttgctcacccagaaacgctggtgaaagtaaaagatgctgaagatcagttgggtgcacgagtgggttacatcgaactggatctcaacagcggtaagatccttgagagttttcgccccgaagaacgttttccaatgatgagcacttttaaagttctgctatgtggcgcggtattatcccgtattgacgccgggcaagagcaactcggtcgccgcatacactattctcagaatgacttggttgagtactcaccagtcacagaaaagcatcttacggatggcatgacagtaagagaattatgcagtgctgccataaccatgagtgataacactgcggccaacttacttctgacaacgatcggaggaccgaaggagctaaccgcttttttgcacaacatgggggatcatgtaactcgccttgatcgttgggaaccggagctgaatgaagccataccaaacgacgagcgtgacaccacgatgcctgtagcaatggcaacaacgttgcgcaaactattaactggcgaactacttactctagcttcccggcaacaattaatagactggatggaggcggataaagttgcaggaccacttctgcgctcggcccttccggctggctggtttattgctgataaatctggagccggtgagcgtgggtctcgcggtatcattgcagcactggggccagatggtaagccctcccgtatcgtagttatctacacgacggggagtcaggcaactatggatgaacgaaatagacagatcgctgagataggtgcctcactgattaagcattggtaactgtcagaccaagtttactcatatatactttagattgatttaaaacttcatttttaatttaaaaggatctaggtgaagatcctttttgataatctcatgaccaaaatcccttaacgtgagttttcgttccactgagcgtcagaccccgtagaaaagatcaaaggatcttcttgagatcctttttttctgcgcgtaatctgctgcttgcaaacaaaaaaaccaccgctaccagcggtggtttgtttgccggatcaagagctaccaactctttttccgaaggtaactggcttcagcagagcgcagataccaaatactgtccttctagtgtagccgtagttaggccaccacttcaagaactctgtagcaccgcctacatacctcgctctgctaatcctgttaccagtggctgctgccagtggcgataagtcgtgtcttaccgggttggactcaagacgatagttaccggataaggcgcagcggtcgggctgaacggggggttcgtgcacacagcccagcttggagcgaacgacctacaccgaactgagatacctacagcgtgagctatgagaaagcgccacgcttcccgaagggagaaaggcggacaggtatccggtaagcggcagggtcggaacaggagagcgcacgagggagcttccagggggaaacgcctggtatctttatagtcctgtcgggtttcgccacctctgacttgagcgtcgatttttgtgatgctcgtcaggggggcggagcctatggaaaaacgccagcaacgcggcctttttacggttcctggccttttgctggccttttgctcacatgttctttcctgcgttatcccctgattctgtggataaccgtattaccgcctttgagtgagctgataccgctcgccgcagccgaacgaccgagcgcagcgagtcagtgagcgaggaagcggaagagcgcccaatacgcaaaccgcctctccccgcgcgttggccgattcattaatgcagctggcacgacaggtttcccgactggaaagcgggcagtgagcgcaacgcaattaatgtgagttagctcactcattaggcaccccaggctttacactttatgcttccggctcgtatgttgtgtggaattgtgagcggataacaatttcacacaggaaacagctatgaccatgattacgccaagcttgcatgcctgcaggctagcctaagtacgtactcaaaatgccaacaaataaaaaaaaagttgctttaataatgccaaaacaaattaataaaacacttacaacaccggattttttttaattaaaatgtgccatttaggataaatagttaatatttttaataattatttaaaaagccgtatctactaaaatgatttttatttggttgaaaatattaatatgtttaaatcaacacaatctatcaaaattaaactaaaaaaaaaataagtgtacgtggttaacattagtacagtaatataagaggaaaatgagaaattaagaaattgaaagcgagtctaatttttaaattatgaacctgcatatataaaaggaaagaaagaatccaggaagaaaagaaatgaaaccatgcatggtcccctcgtcatcacgagtttctgccatttgcaatagaaacactgaaacacctttctctttgtcacttaattgagatgccgaagccacctcacaccatgaacttcatgaggtgtagcacccaaggcttccatagccatgcatactgaagaatgtctcaagctcagcaccctacttctgtgacgtgtccctcattcaccttcctctcttccctataaataaccacgcctcaggttctccgcttcacaactcaaacattctctccattggtccttaaacactcatcagtcatcaccgcggccgcaaaccatggctactgcagaggctgtcaaggcctccggtgtggctggagagtcctcttctgcctcccagcgagtagcaaaatccgccccgtccacggaccccgtcattcctgtcgatattcctctggcagtccccaccaccaacaaggagctccctcctcctcgacactccaagccttcccaggtgcttcgaggtgtcattgctgttttttactttctgtgcgcctgcttatcgattgtactgactcaatggatcggctacccactcaaataccagtccaaaatggcctgggtggtctgggtagagtacaccaaacaacagttcatcgtggtgatgctgtgtcttgttcaggcactcactagcacagaaatgcgagtttcaggtgacgagactatgaagggtgtcttctccgtcgacggaaacggctacctgtcttccagattcgaagaaagagccattgtcatcgccaaccaccagctctatacagactggatctatctgtggtggtttgctctcaccagcggatttggcggttgcatctacatcctgctcaaaaagtctcttcgaagcattcccattttgggctcgggaatggccaattacaacttcatcttcctgtctcggaaatgggccgacgacgagcagaacatgaaggagcacttccagggtctcaacaagctgcaggcccccgtctggctcacaatgttccccgagggaacaaatacctcccacaatggtactaacaactccaacaagtttgctgctaagatcggagtcaagcccatgaagcatgtcttgttgccccgaactacaggtctgcggtttgccattgagaatctggctcaaactgtagactacctgtacgattgtactcttgcctacgaaggtgtgggccgaggagagtacggacaggacttttacacgcttggaaacgtgtttctgagaggccagggccctgtctatgtcaaagctcactggaccaagtttgtcatcaaggaaattccctacaaggacgaaaagaagtttgaaaagtggctgtatgatctgtggtacgacaaggaccagatgatggacaacttcattgagactggaaagtttttccctgataacgaggagtctgagaagattgccaagttgcagctggcccaccctttgcagggattgcaggtctttgtcattcctgctgctgctgcattgattttgagattgggatggaagtattggcagacgatctgaagttgttagtaagcggccgcaagtgtggatggggaagtgagtgcccggttctgtgtgcacaattggcaatccaagatggatggattcaacacagggatatagcgagctacgtggtggtgcgaggatatagcaacggatatttatgtttgacacttgagaatgtacgatacaagcactgtccaagtacaatactaaacatactgtacatactcatactcgtacccgggcaacggtttcacttgagtgcagtggctagtgctcttactcgtacagtgtgcaatactgcgtatcatagtctttgatgtatatcgtattcattcatgttagttgc

SEQ ID NO: 113 - DNA, 6507 bp, Artificial Sequence
  plasmid pKR1244
  misc_feature (4340)..(4340): n is a, c, g, or t
ggccgcgacacaagtgtgagagtactaaataaatgctttggttgtacgaaatcattacactaaataaaataatcaaagcttatatatgccttccgctaaggccgaatgcaaagaaattggttctttctcgttatcttttgccacttttactagtacgtattaattactacttaatcatctttgtttacggctcattatatccggtctagaggatccaaggccgcgaagttaaaagcaatgttgtcacttgtcgtactaacacatgatgtgatagtttatgctagctagctataacataagctgtctctgagtgtgttgtatattaataaagatcatcactggtgaatggtgatcgtgtacgtaccctacttagtaggcaatggaagcacttagagtgtgctttgtgcatggccttgcctctgttttgagacttttgtaatgttttcgagtttaaatctttgcctttgcgtacgtgggcggatcccccgggctgcaggaattcactggccgtcgttttacaacgtcgtgactgggaaaaccctggcgttacccaacttaatcgccttgcagcacatccccctttcgccagctggcgtaatagcgaagaggcccgcaccgatcgcccttcccaacagttgcgcagcctgaatggcgaatggcgcctgatgcggtattttctccttacgcatctgtgcggtatttcacaccgcatatggtgcactctcagtacaatctgctctgatgccgcatagttaagccagccccgacacccgccaacacccgctgacgcgccctgacgggcttgtctgctcccggcatccgcttacagacaagctgtgaccgtctccgggagctgcatgtgtcagaggttttcaccgtcatcaccgaaacgcgcgagacgaaagggcctcgtgatacgcctatttttataggttaatgtcatgataataatggtttcttagacgtcaggtggcacttttcggggaaatgtgcgcggaacccctatttgtttatttttctaaatacattcaaatatgtatccgctcatgagacaataaccctgataaatgcttcaataatattgaaaaaggaagagtatgagtattcaacatttccgtgtcgcccttattcccttttttgcggcattttgccttcctgtttttgctcacccagaaacgctggtgaaagtaaaagatgctgaagatcagttgggtgcacgagtgggttacatcgaactggatctcaacagcggtaagatccttgagagttttcgccccgaagaacgttttccaatgatgagcacttttaaagttctgctatgtggcgcggtattatcccgtattgacgccgggcaagagcaactcggtcgccgcatacactattctcagaatgacttggttgagtactcaccagtcacagaaaagcatcttacggatggcatgacagtaagagaattatgcagtgctgccataaccatgagtgataacactgcggccaacttacttctgacaacgatcggaggaccgaaggagctaaccgcttttttgcacaacatgggggatcatgtaactcgccttgatcgttgggaaccggagctgaatgaagccataccaaacgacgagcgtgacaccacgatgcctgtagcaatggcaacaacgttgcgcaaactattaactggcgaactacttactctagcttcccggcaacaattaatagactggatggaggcggataaagttgcaggaccacttctgcgctcggcccttccggctggctggtttattgctgataaatctggagccggtgagcgtgggtctcgcggtatcattgcagcactggggccagatggtaagccctcccgtatcgtagttatctacacgacggggagtcaggcaactatggatgaacgaaatagacagatcgctgagataggtgcctcactgattaagcattggtaactgtcagaccaagtttactcatatatactttagattgatttaaaacttcatttttaatttaaaaggatctaggtgaagatcctttttgataatctcatgaccaaaatcccttaacgtgagttttcgttccactgagcgtcagaccccgtagaaaagatcaaaggatcttcttgagatcctttttttctgcgcgtaatctgctgcttgcaaacaaaaaaaccaccgctaccagcggtggtttgtttgccggatcaagagctaccaactctttttccgaaggtaactggcttcagcagagcgcagataccaaatactgtccttctagtgtagccgtagttaggccaccacttcaagaactctgtagcaccgcctacatacctcgctctgctaatcctgttaccagtggctgctgccagtggcgataagtcgtgtcttaccgggttggactcaagacgatagttaccggataaggcgcagcggtcgggctgaacggggggttcgtgcacacagcccagcttggagcgaacgacctacaccgaactgagatacctacagcgtgagctatgagaaagcgccacgcttcccgaagggagaaaggcggacaggtatccggtaagcggcagggtcggaacaggagagcgcacgagggagcttccagggggaaacgcctggtatctttatagtcctgtcgggtttcgccacctctgacttgagcgtcgatttttgtgatgctcgtcaggggggcggagcctatggaaaaacgccagcaacgcggcctttttacggttcctggccttttgctggccttttgctcacatgttctttcctgcgttatcccctgattctgtggataaccgtattaccgcctttgagtgagctgataccgctcgccgcagccgaacgaccgagcgcagcgagtcagtgagcgaggaagcggaagagcgcccaatacgcaaaccgcctctccccgcgcgttggccgattcattaatgcagctggcacgacaggtttcccgactggaaagcgggcagtgagcgcaacgcaattaatgtgagttagctcactcattaggcaccccaggctttacactttatgcttccggctcgtatgttgtgtggaattgtgagcggataacaatttcacacaggaaacagctatgaccatgattacgccaagcttgcatgcctgcaggtcgactcgacgtacgtcctcgaagagaagggttaataacacattttttaacatttttaacacaaattttagttatttaaaaatttattaaaaaatttaaaataagaagaggaactctttaaataaatctaacttacaaaatttatgatttttaataagttttcaccaataaaaaatgtcataaaaatatgttaaaaagtatattatcaatattctctttatgataaataaaaagaaaaaaaaaataaaagttaagtgaaaatgagattgaagtgactttaggtgtgtataaatatatcaaccccgccaacaatttatttaatccaaatatattgaagtatattattccatagcctttatttatttatatatttattatataaaagctttatttgttctaggttgttcatgaaatatttttttggttttatctccgttgtaagaaaatcatgtgctttgtgtcgccactcactattgcagctttttcatgcattggtcagattgacggttgattgtatttttgttttttatggttttgtgttatgacttaagtcttcatctctttatctcttcatcaggtttgatggttacctaatatggtccatgggtacatgcatggttaaattaggtggccaactttgttgtgaacgatagaattttttttatattaagtaaactatttttatattatgaaataataataaaaaaaatattttatcattattaacaaaatcatattagttaatttgttaactctataataaaagaaatactgtaacattcacattacatggtaacatctttccaccctttcatttgttttttgtttgatgactttttttcttgtttaaatttatttcccttcttttaaatttggaatacattatcatcatatataaactaaaatactaaaaacaggattacacaaatgataaataataacacaaatatttataaatctagctgcaatatatttaaactagctatatcgatattgtaaaataaaactagctgcattgatactgataaaaaaatatcatgtgctttctggactgatgatgcagtatacttttgacattgcctttattttatttttcagaaaagctttcttagttctgggttcttcattatttgtttcccatctccattgtgaattgaatcatttgcttcgtgtcacaaatacaatttagntaggtacatgcattggtcagattcacggtttattatgtcatgacttaagttcatggtagtacattacctgccacgcatgcattatattggttagatttgataggcaaatttggttgtcaacaatataaatataaataatgtttttatattacgaaataacagtgatcaaaacaaacagttttatctttattaacaagattttgtttttgtttgatgacgttttttaatgtttacgctttcccccttcttttgaatttagaacactttatcatcataaaatcaaatactaaaaaaattacatatttcataaataataacacaaatatttttaaaaaatctgaaataataatgaacaatattacatattatcacgaaaattcattaataaaaatattatataaataaaatgtaatagtagttatatgtaggaaaaaagtactgcacgcataatatatacaaaaagattaaaatgaactattataaataataacactaaattaatggtgaatcatatcaaaataatgaaaaagtaaataaaatttgtaattaacttctatatgtattacacacacaaataataaataatagtaaaaaaaattatgataaatatttaccatctcataagatatttaaaataatgataaaaatatagattattttttatgcaactagctagccaaaaagagaacacgggtatatataaaaagagtacctttaaattctactgtacttcctttattcctgacgtttttatatcaagtggacatacgtgaagattttaattatcagtctaaatatttcattagcacttaatacttttctgttttattcctatcctataagtagtcccgattctcccaacattgcttattcacacaactaactaagaaagtcttccatagccccccaagcggccgcaaaccatggctactgcagaggctgtcaaggcctccggtgtggctggagagtcctcttctgcctcccagcgagtagcaaaatccgccccgtccacggaccccgtcattcctgtcgatattcctctggcagtccccaccaccaacaaggagctccctcctcctcgacactccaagccttcccaggtgcttcgaggtgtcattgctgttttttactttctgtgcgcctgcttatcgattgtactgactcaatggatcggctacccactcaaataccagtccaaaatggcctgggtggtctgggtagagtacaccaaacaacagttcatcgtggtgatgctgtgtcttgttcaggcactcactagcacagaaatgcgagtttcaggtgacgagactatgaagggtgtcttctccgtcgacggaaacggctacctgtcttccagattcgaagaaagagccattgtcatcgccaaccaccagctctatacagactggatctatctgtggtggtttgctctcaccagcggatttggcggttgcatctacatcctgctcaaaaagtctcttcgaagcattcccattttgggctcgggaatggccaattacaacttcatcttcctgtctcggaaatgggccgacgacgagcagaacatgaaggagcacttccagggtctcaacaagctgcaggcccccgtctggctcacaatgttccccgagggaacaaatacctcccacaatggtactaacaactccaacaagtttgctgctaagatcggagtcaagcccatgaagcatgtcttgttgccccgaactacaggtctgcggtttgccattgagaatctggctcaaactgtagactacctgtacgattgtactcttgcctacgaaggtgtgggccgaggagagtacggacaggacttttacacgcttggaaacgtgtttctgagaggccagggccctgtctatgtcaaagctcactggaccaagtttgtcatcaaggaaattccctacaaggacgaaaagaagtttgaaaagtggctgtatgatctgtggtacgacaaggaccagatgatggacaacttcattgagactggaaagtttttccctgataacgaggagtctgagaagattgccaagttgcagctggcccaccctttgcagggattgcaggtctttgtcattcctgctgctgctgcattgattttgagattgggatggaagtattggcagacgatctgaagttgttagtaagc

SEQ ID NO: 114 - DNA, 8928 bp, Artificial Sequence
  plasmid pY27 PDAT
ggccgccaccgcggcccgagattccggcctcttcggccgccaagcgacccgggtggacgtctagaggtacctagcaattaacagatagtttgccggtgataattctcttaacctcccacactcctttgacataacgatttatgtaacgaaactgaaatttgaccagatattgtgtccgcggtggagctccagcttttgttccctttagtgagggttaatttcgagcttggcgtaatcatggtcatagctgtttcctgtgtgaaattgttatccgctcacaattccacacaacgtacgagccggaagcataaagtgtaaagcctggggtgcctaatgagtgagctaactcacattaattgcgttgcgctcactgcccgctttccagtcgggaaacctgtcgtgccagctgcattaatgaatcggccaacgcgcggggagaggcggtttgcgtattgggcgctcttccgcttcctcgctcactgactcgctgcgctcggtcgttcggctgcggcgagcggtatcagctcactcaaaggcggtaatacggttatccacagaatcaggggataacgcaggaaagaacatgtgagcaaaaggccagcaaaaggccaggaaccgtaaaaaggccgcgttgctggcgtttttccataggctccgcccccctgacgagcatcacaaaaatcgacgctcaagtcagaggtggcgaaacccgacaggactataaagataccaggcgtttccccctggaagctccctcgtgcgctctcctgttccgaccctgccgcttaccggatacctgtccgcctttctcccttcgggaagcgtggcgctttctcatagctcacgctgtaggtatctcagttcggtgtaggtcgttcgctccaagctgggctgtgtgcacgaaccccccgttcagcccgaccgctgcgccttatccggtaactatcgtcttgagtccaacccggtaagacacgacttatcgccactggcagcagccactggtaacaggattagcagagcgaggtatgtaggcggtgctacagagttcttgaagtggtggcctaactacggctacactagaaggacagtatttggtatctgcgctctgctgaagccagttaccttcggaaaaagagttggtagctcttgatccggcaaacaaaccaccgctggtagcggtggtttttttgtttgcaagcagcagattacgcgcagaaaaaaaggatctcaagaagatcctttgatcttttctacggggtctgacgctcagtggaacgaaaactcacgttaagggattttggtcatgagattatcaaaaaggatcttcacctagatccttttaaattaaaaatgaagttttaaatcaatctaaagtatatatgagtaaacttggtctgacagttaccaatgcttaatcagtgaggcacctatctcagcgatctgtctatttcgttcatccatagttgcctgactccccgtcgtgtagataactacgatacgggagggcttaccatctggccccagtgctgcaatgataccgcgagacccacgctcaccggctccagatttatcagcaataaaccagccagccggaagggccgagcgcagaagtggtcctgcaactttatccgcctccatccagtctattaattgttgccgggaagctagagtaagtagttcgccagttaatagtttgcgcaacgttgttgccattgctacaggcatcgtggtgtcacgctcgtcgtttggtatggcttcattcagctccggttcccaacgatcaaggcgagttacatgatcccccatgttgtgcaaaaaagcggttagctccttcggtcctccgatcgttgtcagaagtaagttggccgcagtgttatcactcatggttatggcagcactgcataattctcttactgtcatgccatccgtaagatgcttttctgtgactggtgagtactcaaccaagtcattctgagaatagtgtatgcggcgaccgagttgctcttgcccggcgtcaatacgggataataccgcgccacatagcagaactttaaaagtgctcatcattggaaaacgttcttcggggcgaaaactctcaaggatcttaccgctgttgagatccagttcgatgtaacccactcgtgcacccaactgatcttcagcatcttttactttcaccagcgtttctgggtgagcaaaaacaggaaggcaaaatgccgcaaaaaagggaataagggcgacacggaaatgttgaatactcatactcttcctttttcaatattattgaagcatttatcagggttattgtctcatgagcggatacatatttgaatgtatttagaaaaataaacaaataggggttccgcgcacatttccccgaaaagtgccacctgacgcgccctgtagcggcgcattaagcgcggcgggtgtggtggttacgcgcagcgtgaccgctacacttgccagcgccctagcgcccgctcctttcgctttcttcccttcctttctcgccacgttcgccggctttccccgtcaagctctaaatcgggggctccctttagggttccgatttagtgctttacggcacctcgaccccaaaaaacttgattagggtgatggttcacgtagtgggccatcgccctgatagacggtttttcgccctttgacgttggagtccacgttctttaatagtggactcttgttccaaactggaacaacactcaaccctatctcggtctattcttttgatttataagggattttgccgatttcggcctattggttaaaaaatgagctgatttaacaaaaatttaacgcgaattttaacaaaatattaacgcttacaatttccattcgccattcaggctgcgcaactgttgggaagggcgatcggtgcgggcctcttcgctattacgccagctggcgaaagggggatgtgctgcaaggcgattaagttgggtaacgccagggttttcccagtcacgacgttgtaaaacgacggccagtgaattgtaatacgactcactatagggcgaattgggtaccgggccccccctcgaggtcgatggtgtcgataagcttgatatcgaattcatgtcacacaaaccgatcttcgcctcaaggaaacctaattctacatccgagagactgccgagatccagtctacactgattaattttcgggccaataatttaaaaaaatcgtgttatataatattatatgtattatatatatacatcatgatgatactgacagtcatgtcccattgctaaatagacagactccatctgccgcctccaactgatgttctcaatatttaaggggtcatctcgcattgtttaataataaacagactccatctaccgcctccaaatgatgttctcaaaatatattgtatgaacttatttttattacttagtattattagacaacttacttgctttatgaaaaacacttcctatttaggaaacaatttataatggcagttcgttcatttaacaatttatgtagaataaatgttataaatgcgtatgggaaatcttaaatatggatagcataaatgatatctgcattgcctaattcgaaatcaacagcaacgaaaaaaatcccttgtacaacataaatagtcatcgagaaatatcaactatcaaagaacagctattcacacgttactattgagattattattggacgagaatcacacactcaactgtctttctctcttctagaaatacaggtacaagtatgtactattctcattgttcatacttctagtcatttcatcccacatattccttggatttctctccaatgaatgacattctatcttgcaaattcaacaattataataagatataccaaagtagcggtatagtggcaatcaaaaagcttctctggtgtgcttctcgtatttatttttattctaatgatccattaaaggtatatatttatttcttgttatataatccttttgtttattacatgggctggatacataaaggtattttgatttaattttttgcttaaattcaatcccccctcgttcagtgtcaactgtaatggtaggaaattaccatacttttgaagaagcaaaaaaaatgaaagaaaaaaaaaatcgtatttccaggttagacgttccgcagaatctagaatgcggtatgcggtacattgttcttcgaacgtaaaagttgcgctccctgagatattgtacatttttgcttttacaagtacaagtacatcgtacaactatgtactactgttgatgcatccacaacagtttgttttgtttttttttgttttttttttttctaatgattcattaccgctatgtatacctacttgtacttgtagtaagccgggttattggcgttcaattaatcatagacttatgaatctgcacggtgtgcgctgcgagttacttttagcttatgcatgctacttgggtgtaatattgggatctgttcggaaatcaacggatgctcaaccgatttcgacagtaattaattaagtcatacacaagtcagctttcttcgagcctcatataagtataagtagttcaacgtattagcactgtacccagcatctccgtatcgagaaacacaacaacatgccccattggacagatcatgcggatacacaggttgtgcagtatcatacatactcgatcagacaggtcgtctgaccatcatacaagctgaacaagcgctccatacttgcacgctctctatatacacagttaaattacatatccatagtctaacctctaacagttaatcttctggtaagcctcccagccagccttctggtatcgcttggcctcctcaataggatctcggttctggccgtacagacctcggccgacaattatgatatccgttccggtagacatgacatcctcaacagttcggtactgctgtccgagagcgtctcccttgtcgtcaagacccaccccgggggtcagaataagccagtcctcagagtcgcccttaggtcggttctgggcaatgaagccaaccacaaactcggggtcggatcgggcaagctcaatggtctgcttggagtactcgccagtggccagagagcccttgcaagacagctcggccagcatgagcagacctctggccagcttctcgttgggagaggggactaggaactccttgtactgggagttctcgtagtcagagacgtcctccttcttctgttcagagacagtttcctcggcaccagctcgcaggccagcaatgattccggttccgggtacaccgtgggcgttggtgatatcggaccactcggcgattcggtgacaccggtactggtgcttgacagtgttgccaatatctgcgaactttctgtcctcgaacaggaagaaaccgtgcttaagagcaagttccttgagggggagcacagtgccggcgtaggtgaagtcgtcaatgatgtcgatatgggttttgatcatgcacacataaggtccgaccttatcggcaagctcaatgagctccttggtggtggtaacatccagagaagcacacaggttggttttcttggctgccacgagcttgagcactcgagcggcaaaggcggacttgtggacgttagctcgagcttcgtaggagggcattttggtggtgaagaggagactgaaataaatttagtctgcagaactttttatcggaaccttatctggggcagtgaagtatatgttatggtaatagttacgagttagttgaacttatagatagactggactatacggctatcggtccaaattagaaagaacgtcaatggctctctgggcgtcgcctttgccgacaaaaatgtgatcatgatgaaagccagcaatgacgttgcagctgatattgttgtcggccaaccgcgccgaaaacgcagctgtcagacccacagcctccaacgaagaatgtatcgtcaaagtgatccaagcacactcatagttggagtcgtactccaaaggcggcaatgacgagtcagacagatactcgtcgacgcagtaggatgtcctgcacgggtctttttgtggggtgtggagaaaggggtgcttggagatggaagccggtagaaccgggctgcttgtgcttggagatggaagccggtagaaccgggctgcttggggggatttggggccgctgggctccaaagaggggtaggcatttcgttggggttacgtaattgcggcatttgggtcctgcgcgcatgtcccattggtcagaattagtccggataggagacttatcagccaatcacagcgccggatccacctgtaggttgggttgggtgggagcacccctccacagagtagagtcaaacagcagcagcaacatgatagttgggggtgtgcgtgttaaaggaaaaaaaagaagcttgggttatattcccgctctatttagaggttgcgggatagacgccgacggagggcaatggcgccatggaaccttgcggatatcgatacgccgcggcggactgcgtccgaaccagctccagcagcgttttttccgggccattgagccgactgcgaccccgccaacgtgtcttggcccacgcactcatgtcatgttggtgttgggaggccactttttaagtagcacaaggcacctagctcgcagcaaggtgtccgaaccaaagaagcggctgcagtggtgcaaacggggcggaaacggcgggaaaaagccacgggggcacgaattgaggcacgccctcgaatttgagacgagtcacggccccattcgcccgcgcaatggctcgccaacgcccggtcttttgcaccacatcaggttaccccaagccaaacctttgtgttaaaaagcttaacatattataccgaacgtaggtttgggcgggcttgctccgtctgtccaaggcaacatttatataagggtctgcatcgccggctcaattgaatcttttttcttcttctcttctctatattcattcttgaattaaacacacatcaatccgcggccgcacaatgacacaacctgtgaatcggaaggcgactgtcgagcgggtcgagccagcagtggaggtggctgactccgagtccgaggccaagaccgacgtccacgttcaccaccatcatcaccaccacaagcgaaaatccgtcaagggcaagattctcaacttcttcacccgaagtcgacgtatcaccttcgtcctcggcgccgtggtcggtgtgatagccgcgggatactacgctgcgccaccggagctcagcattgatatcgatgctcttctcggcgacttgccctcgttcgactttgacgctctatctctcgacaacttgtccatggacagtgtgtcggactttgtacaagacatgaaatcgcggtttccgaccaagattctgcaggaggcggccaagatcgagaagcaccagaaaagcgaacagaaggctgccccttttgctgtgggcaaggctatgaagagcgagggactcaacgccaagtacccggtggtgctggtgcccggcgtcatctccacgggactggagagctggtccctggagggaaccgaggagtgtcccaccgagtcgcacttcagaaagcgaatgtggggctcctggtacatgatccgagtcatgctgctggacaagtactgctggctgcagaacctgatgctggacacagagaccggtctagaccctccccatttcaagctgcgagccgcccagggatttgcctccgccgacttctttatggcaggctactggctgtggaacaagctgctcgagaacctggctgttattggatacgatacggatacaatgtctgctgcggcgtacgactggagactgtcctaccctgatttggagcaccgagacggatacttctccaagctcaaagcttcaatcgaagagactaagcgtatgacaggtgagaagacagttctgacgggccattccatgggctcccaggtcatcttctacttcatgaagtgggctgaggccgagggatatggaggaggaggtcccaactgggtcaatgaccatattgaatcctttgtcgacatttccggctccatgctgggtactcccaagaccctggttgctcttctgtctggagaaatgaaggataccgtgcagctgaacgcgatggctgtgtatggactggagcagttcttctctcgacgagagcgagccgatctgctgcgaacatggggaggaattgcttccatgattcccaagggtggtaaggctatctggggtgatcattctggagcccctgatgacgagcccggccagaatgtcacctttggcaacttcatcaagttcaaggagtccttgaccgagtactctgctaagaacctcaccatggatgaaaccgttgacttcctgtattctcagtctcccgagtggtttgtgaaccgaaccgagggtgcttactcctttggaattgccaagactcgaaagcaggttgagcagaatgagaagcgaccttctacctggagcaaccctctggaagctgctctccccaatgcccccgatctcaagatctactgcttctatggagtcggtaaggataccgagcgagcctactactaccaggatgagcccaatcccgagcagaccaacttgaacgtcagtatcgctggaaacgaccctgatggtgtgcttatgggtcagggcgatggaaccgtctcccttgtgacccataccatgtgtcaccgatggaaggacgagaattccaagttcaaccctggtaacgcccaggtcaaggttgtggagatgttgcaccagcctgatcgacttgatattcgaggcggtgctcagactgccgagcatgtggacattctggggcgttctgagttgaacgagatggttctgaaggtggctagtggaaagggaaatgagattgaagagagagtcatctccaacattgatgagtgggtgtggaagattgatctcggcagcaattaggc

SEQ ID NO: 115 - DNA, 7210 bp, Artificial Sequence
  plasmid pKR1246
  misc_feature (4340)..(4340): n is a, c, g, or t
ggccgcgacacaagtgtgagagtactaaataaatgctttggttgtacgaaatcattacactaaataaaataatcaaagcttatatatgccttccgctaaggccgaatgcaaagaaattggttctttctcgttatcttttgccacttttactagtacgtattaattactacttaatcatctttgtttacggctcattatatccggtctagaggatccaaggccgcgaagttaaaagcaatgttgtcacttgtcgtactaacacatgatgtgatagtttatgctagctagctataacataagctgtctctgagtgtgttgtatattaataaagatcatcactggtgaatggtgatcgtgtacgtaccctacttagtaggcaatggaagcacttagagtgtgctttgtgcatggccttgcctctgttttgagacttttgtaatgttttcgagtttaaatctttgcctttgcgtacgtgggcggatcccccgggctgcaggaattcactggccgtcgttttacaacgtcgtgactgggaaaaccctggcgttacccaacttaatcgccttgcagcacatccccctttcgccagctggcgtaatagcgaagaggcccgcaccgatcgcccttcccaacagttgcgcagcctgaatggcgaatggcgcctgatgcggtattttctccttacgcatctgtgcggtatttcacaccgcatatggtgcactctcagtacaatctgctctgatgccgcatagttaagccagccccgacacccgccaacacccgctgacgcgccctgacgggcttgtctgctcccggcatccgcttacagacaagctgtgaccgtctccgggagctgcatgtgtcagaggttttcaccgtcatcaccgaaacgcgcgagacgaaagggcctcgtgatacgcctatttttataggttaatgtcatgataataatggtttcttagacgtcaggtggcacttttcggggaaatgtgcgcggaacccctatttgtttatttttctaaatacattcaaatatgtatccgctcatgagacaataaccctgataaatgcttcaataatattgaaaaaggaagagtatgagtattcaacatttccgtgtcgcccttattcccttttttgcggcattttgccttcctgtttttgctcacccagaaacgctggtgaaagtaaaagatgctgaagatcagttgggtgcacgagtgggttacatcgaactggatctcaacagcggtaagatccttgagagttttcgccccgaagaacgttttccaatgatgagcacttttaaagttctgctatgtggcgcggtattatcccgtattgacgccgggcaagagcaactcggtcgccgcatacactattctcagaatgacttggttgagtactcaccagtcacagaaaagcatcttacggatggcatgacagtaagagaattatgcagtgctgccataaccatgagtgataacactgcggccaacttacttctgacaacgatcggaggaccgaaggagctaaccgcttttttgcacaacatgggggatcatgtaactcgccttgatcgttgggaaccggagctgaatgaagccataccaaacgacgagcgtgacaccacgatgcctgtagcaatggcaacaacgttgcgcaaactattaactggcgaactacttactctagcttcccggcaacaattaatagactggatggaggcggataaagttgcaggaccacttctgcgctcggcccttccggctggctggtttattgctgataaatctggagccggtgagcgtgggtctcgcggtatcattgcagcactggggccagatggtaagccctcccgtatcgtagttatctacacgacggggagtcaggcaactatggatgaacgaaatagacagatcgctgagataggtgcctcactgattaagcattggtaactgtcagaccaagtttactcatatatactttagattgatttaaaacttcatttttaatttaaaaggatctaggtgaagatcctttttgataatctcatgaccaaaatcccttaacgtgagttttcgttccactgagcgtcagaccccgtagaaaagatcaaaggatcttcttgagatcctttttttctgcgcgtaatctgctgcttgcaaacaaaaaaaccaccgctaccagcggtggtttgtttgccggatcaagagctaccaactctttttccgaaggtaactggcttcagcagagcgcagataccaaatactgtccttctagtgtagccgtagttaggccaccacttcaagaactctgtagcaccgcctacatacctcgctctgctaatcctgttaccagtggctgctgccagtggcgataagtcgtgtcttaccgggttggactcaagacgatagttaccggataaggcgcagcggtcgggctgaacggggggttcgtgcacacagcccagcttggagcgaacgacctacaccgaactgagatacctacagcgtgagctatgagaaagcgccacgcttcccgaagggagaaaggcggacaggtatccggtaagcggcagggtcggaacaggagagcgcacgagggagcttccagggggaaacgcctggtatctttatagtcctgtcgggtttcgccacctctgacttgagcgtcgatttttgtgatgctcgtcaggggggcggagcctatggaaaaacgccagcaacgcggcctttttacggttcctggccttttgctggccttttgctcacatgttctttcctgcgttatcccctgattctgtggataaccgtattaccgcctttgagtgagctgataccgctcgccgcagccgaacgaccgagcgcagcgagtcagtgagcgaggaagcggaagagcgcccaatacgcaaaccgcctctccccgcgcgttggccgattcattaatgcagctggcacgacaggtttcccgactggaaagcgggcagtgagcgcaacgcaattaatgtgagttagctcactcattaggcaccccaggctttacactttatgcttccggctcgtatgttgtgtggaattgtgagcggataacaatttcacacaggaaacagctatgaccatgattacgccaagcttgcatgcctgcaggtcgactcgacgtacgtcctcgaagagaagggttaataacacattttttaacatttttaacacaaattttagttatttaaaaatttattaaaaaatttaaaataagaagaggaactctttaaataaatctaacttacaaaatttatgatttttaataagttttcaccaataaaaaatgtcataaaaatatgttaaaaagtatattatcaatattctctttatgataaataaaaagaaaaaaaaaataaaagttaagtgaaaatgagattgaagtgactttaggtgtgtataaatatatcaaccccgccaacaatttatttaatccaaatatattgaagtatattattccatagcctttatttatttatatatttattatataaaagctttatttgttctaggttgttcatgaaatatttttttggttttatctccgttgtaagaaaatcatgtgctttgtgtcgccactcactattgcagctttttcatgcattggtcagattgacggttgattgtatttttgttttttatggttttgtgttatgacttaagtcttcatctctttatctcttcatcaggtttgatggttacctaatatggtccatgggtacatgcatggttaaattaggtggccaactttgttgtgaacgatagaattttttttatattaagtaaactatttttatattatgaaataataataaaaaaaatattttatcattattaacaaaatcatattagttaatttgttaactctataataaaagaaatactgtaacattcacattacatggtaacatctttccaccctttcatttgttttttgtttgatgactttttttcttgtttaaatttatttcccttcttttaaatttggaatacattatcatcatatataaactaaaatactaaaaacaggattacacaaatgataaataataacacaaatatttataaatctagctgcaatatatttaaactagctatatcgatattgtaaaataaaactagctgcattgatactgataaaaaaatatcatgtgctttctggactgatgatgcagtatacttttgacattgcctttattttatttttcagaaaagctttcttagttctgggttcttcattatttgtttcccatctccattgtgaattgaatcatttgcttcgtgtcacaaatacaatttagntaggtacatgcattggtcagattcacggtttattatgtcatgacttaagttcatggtagtacattacctgccacgcatgcattatattggttagatttgataggcaaatttggttgtcaacaatataaatataaataatgtttttatattacgaaataacagtgatcaaaacaaacagttttatctttattaacaagattttgtttttgtttgatgacgttttttaatgtttacgctttcccccttcttttgaatttagaacactttatcatcataaaatcaaatactaaaaaaattacatatttcataaataataacacaaatatttttaaaaaatctgaaataataatgaacaatattacatattatcacgaaaattcattaataaaaatattatataaataaaatgtaatagtagttatatgtaggaaaaaagtactgcacgcataatatatacaaaaagattaaaatgaactattataaataataacactaaattaatggtgaatcatatcaaaataatgaaaaagtaaataaaatttgtaattaacttctatatgtattacacacacaaataataaataatagtaaaaaaaattatgataaatatttaccatctcataagatatttaaaataatgataaaaatatagattattttttatgcaactagctagccaaaaagagaacacgggtatatataaaaagagtacctttaaattctactgtacttcctttattcctgacgtttttatatcaagtggacatacgtgaagattttaattatcagtctaaatatttcattagcacttaatacttttctgttttattcctatcctataagtagtcccgattctcccaacattgcttattcacacaactaactaagaaagtcttccatagccccccaagcggccgcacaatgacacaacctgtgaatcggaaggcgactgtcgagcgggtcgagccagcagtggaggtggctgactccgagtccgaggccaagaccgacgtccacgttcaccaccatcatcaccaccacaagcgaaaatccgtcaagggcaagattctcaacttcttcacccgaagtcgacgtatcaccttcgtcctcggcgccgtggtcggtgtgatagccgcgggatactacgctgcgccaccggagctcagcattgatatcgatgctcttctcggcgacttgccctcgttcgactttgacgctctatctctcgacaacttgtccatggacagtgtgtcggactttgtacaagacatgaaatcgcggtttccgaccaagattctgcaggaggcggccaagatcgagaagcaccagaaaagcgaacagaaggctgccccttttgctgtgggcaaggctatgaagagcgagggactcaacgccaagtacccggtggtgctggtgcccggcgtcatctccacgggactggagagctggtccctggagggaaccgaggagtgtcccaccgagtcgcacttcagaaagcgaatgtggggctcctggtacatgatccgagtcatgctgctggacaagtactgctggctgcagaacctgatgctggacacagagaccggtctagaccctccccatttcaagctgcgagccgcccagggatttgcctccgccgacttctttatggcaggctactggctgtggaacaagctgctcgagaacctggctgttattggatacgatacggatacaatgtctgctgcggcgtacgactggagactgtcctaccctgatttggagcaccgagacggatacttctccaagctcaaagcttcaatcgaagagactaagcgtatgacaggtgagaagacagttctgacgggccattccatgggctcccaggtcatcttctacttcatgaagtgggctgaggccgagggatatggaggaggaggtcccaactgggtcaatgaccatattgaatcctttgtcgacatttccggctccatgctgggtactcccaagaccctggttgctcttctgtctggagaaatgaaggataccgtgcagctgaacgcgatggctgtgtatggactggagcagttcttctctcgacgagagcgagccgatctgctgcgaacatggggaggaattgcttccatgattcccaagggtggtaaggctatctggggtgatcattctggagcccctgatgacgagcccggccagaatgtcacctttggcaacttcatcaagttcaaggagtccttgaccgagtactctgctaagaacctcaccatggatgaaaccgttgacttcctgtattctcagtctcccgagtggtttgtgaaccgaaccgagggtgcttactcctttggaattgccaagactcgaaagcaggttgagcagaatgagaagcgaccttctacctggagcaaccctctggaagctgctctccccaatgcccccgatctcaagatctactgcttctatggagtcggtaaggataccgagcgagcctactactaccaggatgagcccaatcccgagcagaccaacttgaacgtcagtatcgctggaaacgaccctgatggtgtgcttatgggtcagggcgatggaaccgtctcccttgtgacccataccatgtgtcaccgatggaaggacgagaattccaagttcaaccctggtaacgcccaggtcaaggttgtggagatgttgcaccagcctgatcgacttgatattcgaggcggtgctcagactgccgagcatgtggacattctggggcgttctgagttgaacgagatggttctgaaggtggctagtggaaagggaaatgagattgaagagagagtcatctccaacattgatgagtgggtgtggaagattgatctcggcagcaattaggc

SEQ ID NO: 116 - DNA, 7069 bp, Artificial Sequence
  plasmid pYAT-ACBP
ggccgcaagtgtggatggggaagtgagtgcccggttctgtgtgcacaattggcaatccaagatggatggattcaacacagggatatagcgagctacgtggtggtgcgaggatatagcaacggatatttatgtttgacacttgagaatgtacgatacaagcactgtccaagtacaatactaaacatactgtacatactcatactcgtacccgggcaacggtttcacttgagtgcagtggctagtgctcttactcgtacagtgtgcaatactgcgtatcatagtctttgatgtatatcgtattcattcatgttagttgcgtacgagccggaagcataaagtgtaaagcctggggtgcctaatgagtgagctaactcacattaattgcgttgcgctcactgcccgctttccagtcgggaaacctgtcgtgccagctgcattaatgaatcggccaacgcgcggggagaggcggtttgcgtattgggcgctcttccgcttcctcgctcactgactcgctgcgctcggtcgttcggctgcggcgagcggtatcagctcactcaaaggcggtaatacggttatccacagaatcaggggataacgcaggaaagaacatgtgagcaaaaggccagcaaaaggccaggaaccgtaaaaaggccgcgttgctggcgtttttccataggctccgcccccctgacgagcatcacaaaaatcgacgctcaagtcagaggtggcgaaacccgacaggactataaagataccaggcgtttccccctggaagctccctcgtgcgctctcctgttccgaccctgccgcttaccggatacctgtccgcctttctcccttcgggaagcgtggcgctttctcatagctcacgctgtaggtatctcagttcggtgtaggtcgttcgctccaagctgggctgtgtgcacgaaccccccgttcagcccgaccgctgcgccttatccggtaactatcgtcttgagtccaacccggtaagacacgacttatcgccactggcagcagccactggtaacaggattagcagagcgaggtatgtaggcggtgctacagagttcttgaagtggtggcctaactacggctacactagaaggacagtatttggtatctgcgctctgctgaagccagttaccttcggaaaaagagttggtagctcttgatccggcaaacaaaccaccgctggtagcggtggtttttttgtttgcaagcagcagattacgcgcagaaaaaaaggatctcaagaagatcctttgatcttttctacggggtctgacgctcagtggaacgaaaactcacgttaagggattttggtcatgagattatcaaaaaggatcttcacctagatccttttaaattaaaaatgaagttttaaatcaatctaaagtatatatgagtaaacttggtctgacagttaccaatgcttaatcagtgaggcacctatctcagcgatctgtctatttcgttcatccatagttgcctgactccccgtcgtgtagataactacgatacgggagggcttaccatctggccccagtgctgcaatgataccgcgagacccacgctcaccggctccagatttatcagcaataaaccagccagccggaagggccgagcgcagaagtggtcctgcaactttatccgcctccatccagtctattaattgttgccgggaagctagagtaagtagttcgccagttaatagtttgcgcaacgttgttgccattgctacaggcatcgtggtgtcacgctcgtcgtttggtatggcttcattcagctccggttcccaacgatcaaggcgagttacatgatcccccatgttgtgcaaaaaagcggttagctccttcggtcctccgatcgttgtcagaagtaagttggccgcagtgttatcactcatggttatggcagcactgcataattctcttactgtcatgccatccgtaagatgcttttctgtgactggtgagtactcaaccaagtcattctgagaatagtgtatgcggcgaccgagttgctcttgcccggcgtcaatacgggataataccgcgccacatagcagaactttaaaagtgctcatcattggaaaacgttcttcggggcgaaaactctcaaggatcttaccgctgttgagatccagttcgatgtaacccactcgtgcacccaactgatcttcagcatcttttactttcaccagcgtttctgggtgagcaaaaacaggaaggcaaaatgccgcaaaaaagggaataagggcgacacggaaatgttgaatactcatactcttcctttttcaatattattgaagcatttatcagggttattgtctcatgagcggatacatatttgaatgtatttagaaaaataaacaaataggggttccgcgcacatttccccgaaaagtgccacctgacgcgccctgtagcggcgcattaagcgcggcgggtgtggtggttacgcgcagcgtgaccgctacacttgccagcgccctagcgcccgctcctttcgctttcttcccttcctttctcgccacgttcgccggctttccccgtcaagctctaaatcgggggctccctttagggttccgatttagtgctttacggcacctcgaccccaaaaaacttgattagggtgatggttcacgtagtgggccatcgccctgatagacggtttttcgccctttgacgttggagtccacgttctttaatagtggactcttgttccaaactggaacaacactcaaccctatctcggtctattcttttgatttataagggattttgccgatttcggcctattggttaaaaaatgagctgatttaacaaaaatttaacgcgaattttaacaaaatattaacgcttacaatttccattcgccattcaggctgcgcaactgttgggaagggcgatcggtgcgggcctcttcgctattacgccagctggcgaaagggggatgtgctgcaaggcgattaagttgggtaacgccagggttttcccagtcacgacgttgtaaaacgacggccagtgaattgtaatacgactcactatagggcgaattgggtaccgggccccccctcgaggtcgatggtgtcgataagcttgatatcgaattcatgtcacacaaaccgatcttcgcctcaaggaaacctaattctacatccgagagactgccgagatccagtctacactgattaattttcgggccaataatttaaaaaaatcgtgttatataatattatatgtattatatatatacatcatgatgatactgacagtcatgtcccattgctaaatagacagactccatctgccgcctccaactgatgttctcaatatttaaggggtcatctcgcattgtttaataataaacagactccatctaccgcctccaaatgatgttctcaaaatatattgtatgaacttatttttattacttagtattattagacaacttacttgctttatgaaaaacacttcctatttaggaaacaatttataatggcagttcgttcatttaacaatttatgtagaataaatgttataaatgcgtatgggaaatcttaaatatggatagcataaatgatatctgcattgcctaattcgaaatcaacagcaacgaaaaaaatcccttgtacaacataaatagtcatcgagaaatatcaactatcaaagaacagctattcacacgttactattgagattattattggacgagaatcacacactcaactgtctttctctcttctagaaatacaggtacaagtatgtactattctcattgttcatacttctagtcatttcatcccacatattccttggatttctctccaatgaatgacattctatcttgcaaattcaacaattataataagatataccaaagtagcggtatagtggcaatcaaaaagcttctctggtgtgcttctcgtatttatttttattctaatgatccattaaaggtatatatttatttcttgttatataatccttttgtttattacatgggctggatacataaaggtattttgatttaattttttgcttaaattcaatcccccctcgttcagtgtcaactgtaatggtaggaaattaccatacttttgaagaagcaaaaaaaatgaaagaaaaaaaaaatcgtatttccaggttagacgttccgcagaatctagaatgcggtatgcggtacattgttcttcgaacgtaaaagttgcgctccctgagatattgtacatttttgcttttacaagtacaagtacatcgtacaactatgtactactgttgatgcatccacaacagtttgttttgtttttttttgttttttttttttctaatgattcattaccgctatgtatacctacttgtacttgtagtaagccgggttattggcgttcaattaatcatagacttatgaatctgcacggtgtgcgctgcgagttacttttagcttatgcatgctacttgggtgtaatattgggatctgttcggaaatcaacggatgctcaatcgatttcgacagtaattaattaagtcatacacaagtcagctttcttcgagcctcatataagtataagtagttcaacgtattagcactgtacccagcatctccgtatcgagaaacacaacaacatgccccattggacagatcatgcggatacacaggttgtgcagtatcatacatactcgatcagacaggtcgtctgaccatcatacaagctgaacaagcgctccatacttgcacgctctctatatacacagttaaattacatatccatagtctaacctctaacagttaatcttctggtaagcctcccagccagccttctggtatcgcttggcctcctcaataggatctcggttctggccgtacagacctcggccgacaattatgatatccgttccggtagacatgacatcctcaacagttcggtactgctgtccgagagcgtctcccttgtcgtcaagacccaccccgggggtcagaataagccagtcctcagagtcgcccttaggtcggttctgggcaatgaagccaaccacaaactcggggtcggatcgggcaagctcaatggtctgcttggagtactcgccagtggccagagagcccttgcaagacagctcggccagcatgagcagacctctggccagcttctcgttgggagaggggactaggaactccttgtactgggagttctcgtagtcagagacgtcctccttcttctgttcagagacagtttcctcggcaccagctcgcaggccagcaatgattccggttccgggtacaccgtgggcgttggtgatatcggaccactcggcgattcggtgacaccggtactggtgcttgacagtgttgccaatatctgcgaactttctgtcctcgaacaggaagaaaccgtgcttaagagcaagttccttgagggggagcacagtgccggcgtaggtgaagtcgtcaatgatgtcgatatgggttttgatcatgcacacataaggtccgaccttatcggcaagctcaatgagctccttggtggtggtaacatccagagaagcacacaggttggttttcttggctgccacgagcttgagcactcgagcggcaaaggcggacttgtggacgttagctcgagcttcgtaggagggcattttggtggtgaagaggagactgaaataaatttagtctgcagaactttttatcggaaccttatctggggcagtgaagtatatgttatggtaatagttacgagttagttgaacttatagatagactggactatacggctatcggtccaaattagaaagaacgtcaatggctctctgggcgtcgcctttgccgacaaaaatgtgatcatgatgaaagccagcaatgacgttgcagctgatattgttgtcggccaaccgcgccgaaaacgcagctgtcagacccacagcctccaacgaagaatgtatcgtcaaagtgatccaagcacactcatagttggagtcgtactccaaaggcggcaatgacgagtcagacagatactcgtcgacataagtttgcaaaaagatcgtatttaaatagttggagcaagggagaaatgtagagtgtgaaagactcactatggtccgggcttatctcgaccaatagccaaagtctggagtttctgagagaaaaaggcaagatacgtatgtaacaaagcgacgcatggtacaataataccggaggcatgtatcatagagagttagtggttcgatgatggcactggtgcctggtatgactttatacggctgactacatatttgtcctcagacatacaattacagtcaagcacttacccttggacatctgtaggtaccccccggccaagacgatctcagcgtgtcgtatgtcggattggcgtagctccctcgctcgtcaattggctcccatctactttcttctgcttggctacacccagcatgtctgctatggctcgttttcgtgccttatctatcctcccagtattaccaactctaaatgacatgatgtgattgggtctacactttcatatcagagataaggagtagcacagttgcataaaaagcccaactctaatcagcttcttcctttcttgtaattagtacaaaggtgattagcgaaatctggaagcttagttggccctaaaaaaatcaaaaaaagcaaaaaacgaaaaacgaaaaaccacagttttgagaacagggaggtaacgaaggatcgtatatatatatatatatatatatacccacggatcccgagaccggcctttgattcttccctacaaccaaccattctcaccaccctaattcacaaccatggcttccgccgaattcaccgccgctgccgactctgtgcagaagcttcccaagactccttccgacgacgagcttcttgagctctacggactgtacaagcaggccaccgtcggcgacaacaacaccgaccgacccggcgccttcaacttcaaggccaagtacaagtgggacgcctgggacaagctcaagggcaagtctcaggaggaggctgagcaggagtacattgctcttgtccagaccctttccgacaagtacaactaagc

SEQ ID NO: 117 - DNA, 3965 bp, Artificial Sequence
  plasmid pKR1245
gtacgtctagaggatcccccgggctgcaggaattcactggccgtcgttttacaacgtcgtgactgggaaaaccctggcgttacccaacttaatcgccttgcagcacatccccctttcgccagctggcgtaatagcgaagaggcccgcaccgatcgcccttcccaacagttgcgcagcctgaatggcgaatggcgcctgatgcggtattttctccttacgcatctgtgcggtatttcacaccgcatatggtgcactctcagtacaatctgctctgatgccgcatagttaagccagccccgacacccgccaacacccgctgacgcgccctgacgggcttgtctgctcccggcatccgcttacagacaagctgtgaccgtctccgggagctgcatgtgtcagaggttttcaccgtcatcaccgaaacgcgcgagacgaaagggcctcgtgatacgcctatttttataggttaatgtcatgataataatggtttcttagacgtcaggtggcacttttcggggaaatgtgcgcggaacccctatttgtttatttttctaaatacattcaaatatgtatccgctcatgagacaataaccctgataaatgcttcaataatattgaaaaaggaagagtatgagtattcaacatttccgtgtcgcccttattcccttttttgcggcattttgccttcctgtttttgctcacccagaaacgctggtgaaagtaaaagatgctgaagatcagttgggtgcacgagtgggttacatcgaactggatctcaacagcggtaagatccttgagagttttcgccccgaagaacgttttccaatgatgagcacttttaaagttctgctatgtggcgcggtattatcccgtattgacgccgggcaagagcaactcggtcgccgcatacactattctcagaatgacttggttgagtactcaccagtcacagaaaagcatcttacggatggcatgacagtaagagaattatgcagtgctgccataaccatgagtgataacactgcggccaacttacttctgacaacgatcggaggaccgaaggagctaaccgcttttttgcacaacatgggggatcatgtaactcgccttgatcgttgggaaccggagctgaatgaagccataccaaacgacgagcgtgacaccacgatgcctgtagcaatggcaacaacgttgcgcaaactattaactggcgaactacttactctagcttcccggcaacaattaatagactggatggaggcggataaagttgcaggaccacttctgcgctcggcccttccggctggctggtttattgctgataaatctggagccggtgagcgtgggtctcgcggtatcattgcagcactggggccagatggtaagccctcccgtatcgtagttatctacacgacggggagtcaggcaactatggatgaacgaaatagacagatcgctgagataggtgcctcactgattaagcattggtaactgtcagaccaagtttactcatatatactttagattgatttaaaacttcatttttaatttaaaaggatctaggtgaagatcctttttgataatctcatgaccaaaatcccttaacgtgagttttcgttccactgagcgtcagaccccgtagaaaagatcaaaggatcttcttgagatcctttttttctgcgcgtaatctgctgcttgcaaacaaaaaaaccaccgctaccagcggtggtttgtttgccggatcaagagctaccaactctttttccgaaggtaactggcttcagcagagcgcagataccaaatactgtccttctagtgtagccgtagttaggccaccacttcaagaactctgtagcaccgcctacatacctcgctctgctaatcctgttaccagtggctgctgccagtggcgataagtcgtgtcttaccgggttggactcaagacgatagttaccggataaggcgcagcggtcgggctgaacggggggttcgtgcacacagcccagcttggagcgaacgacctacaccgaactgagatacctacagcgtgagctatgagaaagcgccacgcttcccgaagggagaaaggcggacaggtatccggtaagcggcagggtcggaacaggagagcgcacgagggagcttccagggggaaacgcctggtatctttatagtcctgtcgggtttcgccacctctgacttgagcgtcgatttttgtgatgctcgtcaggggggcggagcctatggaaaaacgccagcaacgcggcctttttacggttcctggccttttgctggccttttgctcacatgttctttcctgcgttatcccctgattctgtggataaccgtattaccgcctttgagtgagctgataccgctcgccgcagccgaacgaccgagcgcagcgagtcagtgagcgaggaagcggaagagcgcccaatacgcaaaccgcctctccccgcgcgttggccgattcattaatgcagctggcacgacaggtttcccgactggaaagcgggcagtgagcgcaacgcaattaatgtgagttagctcactcattaggcaccccaggctttacactttatgcttccggctcgtatgttgtgtggaattgtgagcggataacaatttcacacaggaaacagctatgaccatgattacgccaagcttgcatgcctgcaggctagcctaagtacgtactcaaaatgccaacaaataaaaaaaaagttgctttaataatgccaaaacaaattaataaaacacttacaacaccggattttttttaattaaaatgtgccatttaggataaatagttaatatttttaataattatttaaaaagccgtatctactaaaatgatttttatttggttgaaaatattaatatgtttaaatcaacacaatctatcaaaattaaactaaaaaaaaaataagtgtacgtggttaacattagtacagtaatataagaggaaaatgagaaattaagaaattgaaagcgagtctaatttttaaattatgaacctgcatatataaaaggaaagaaagaatccaggaagaaaagaaatgaaaccatgcatggtcccctcgtcatcacgagtttctgccatttgcaatagaaacactgaaacacctttctctttgtcacttaattgagatgccgaagccacctcacaccatgaacttcatgaggtgtagcacccaaggcttccatagccatgcatactgaagaatgtctcaagctcagcaccctacttctgtgacgtgtccctcattcaccttcctctcttccctataaataaccacgcctcaggttctccgcttcacaactcaaacattctctccattggtccttaaacactcatcagtcatcaccgcggccgcaaaccatggcttccgccgaattcaccgccgctgccgactctgtgcagaagcttcccaagactccttccgacgacgagcttcttgagctctacggactgtacaagcaggccaccgtcggcgacaacaacaccgaccgacccggcgccttcaacttcaaggccaagtacaagtgggacgcctgggacaagctcaagggcaagtctcaggaggaggctgagcaggagtacattgctcttgtccagaccctttccgacaagtacaactaagcggccgcaagtgtggatggggaagtgagtgcccggttctgtgtgcacaattggcaatccaagatggatggattcaacacagggatatagcgagctacgtggtggtgcgaggatatagcaacggatatttatgtttgacacttgagaatgtacgatacaagcactgtccaagtacaatactaaacatactgtacatactcatactcgtacccgggcaacggtttcacttgagtgcagtggctagtgctcttactcgtacagtgtgcaatactgcgtatcatagtctttgatgtatatcgtattcattcatgttagttgc

SEQ ID NO: 118 - DNA, 5526 bp, Artificial Sequence
  plasmid pKR1250
  misc_feature (4340)..(4340): n is a, c, g, or t
ggccgcgacacaagtgtgagagtactaaataaatgctttggttgtacgaaatcattacactaaataaaataatcaaagcttatatatgccttccgctaaggccgaatgcaaagaaattggttctttctcgttatcttttgccacttttactagtacgtattaattactacttaatcatctttgtttacggctcattatatccggtctagaggatccaaggccgcgaagttaaaagcaatgttgtcacttgtcgtactaacacatgatgtgatagtttatgctagctagctataacataagctgtctctgagtgtgttgtatattaataaagatcatcactggtgaatggtgatcgtgtacgtaccctacttagtaggcaatggaagcacttagagtgtgctttgtgcatggccttgcctctgttttgagacttttgtaatgttttcgagtttaaatctttgcctttgcgtacgtgggcggatcccccgggctgcaggaattcactggccgtcgttttacaacgtcgtgactgggaaaaccctggcgttacccaacttaatcgccttgcagcacatccccctttcgccagctggcgtaatagcgaagaggcccgcaccgatcgcccttcccaacagttgcgcagcctgaatggcgaatggcgcctgatgcggtattttctccttacgcatctgtgcggtatttcacaccgcatatggtgcactctcagtacaatctgctctgatgccgcatagttaagccagccccgacacccgccaacacccgctgacgcgccctgacgggcttgtctgctcccggcatccgcttacagacaagctgtgaccgtctccgggagctgcatgtgtcagaggttttcaccgtcatcaccgaaacgcgcgagacgaaagggcctcgtgatacgcctatttttataggttaatgtcatgataataatggtttcttagacgtcaggtggcacttttcggggaaatgtgcgcggaacccctatttgtttatttttctaaatacattcaaatatgtatccgctcatgagacaataaccctgataaatgcttcaataatattgaaaaaggaagagtatgagtattcaacatttccgtgtcgcccttattcccttttttgcggcattttgccttcctgtttttgctcacccagaaacgctggtgaaagtaaaagatgctgaagatcagttgggtgcacgagtgggttacatcgaactggatctcaacagcggtaagatccttgagagttttcgccccgaagaacgttttccaatgatgagcacttttaaagttctgctatgtggcgcggtattatcccgtattgacgccgggcaagagcaactcggtcgccgcatacactattctcagaatgacttggttgagtactcaccagtcacagaaaagcatcttacggatggcatgacagtaagagaattatgcagtgctgccataaccatgagtgataacactgcggccaacttacttctgacaacgatcggaggaccgaaggagctaaccgcttttttgcacaacatgggggatcatgtaactcgccttgatcgttgggaaccggagctgaatgaagccataccaaacgacgagcgtgacaccacgatgcctgtagcaatggcaacaacgttgcgcaaactattaactggcgaactacttactctagcttcccggcaacaattaatagactggatggaggcggataaagttgcaggaccacttctgcgctcggcccttccggctggctggtttattgctgataaatctggagccggtgagcgtgggtctcgcggtatcattgcagcactggggccagatggtaagccctcccgtatcgtagttatctacacgacggggagtcaggcaactatggatgaacgaaatagacagatcgctgagataggtgcctcactgattaagcattggtaactgtcagaccaagtttactcatatatactttagattgatttaaaacttcatttttaatttaaaaggatctaggtgaagatcctttttgataatctcatgaccaaaatcccttaacgtgagttttcgttccactgagcgtcagaccccgtagaaaagatcaaaggatcttcttgagatcctttttttctgcgcgtaatctgctgcttgcaaacaaaaaaaccaccgctaccagcggtggtttgtttgccggatcaagagctaccaactctttttccgaaggtaactggcttcagcagagcgcagataccaaatactgtccttctagtgtagccgtagttaggccaccacttcaagaactctgtagcaccgcctacatacctcgctctgctaatcctgttaccagtggctgctgccagtggcgataagtcgtgtcttaccgggttggactcaagacgatagttaccggataaggcgcagcggtcgggctgaacggggggttcgtgcacacagcccagcttggagcgaacgacctacaccgaactgagatacctacagcgtgagctatgagaaagcgccacgcttcccgaagggagaaaggcggacaggtatccggtaagcggcagggtcggaacaggagagcgcacgagggagcttccagggggaaacgcctggtatctttatagtcctgtcgggtttcgccacctctgacttgagcgtcgatttttgtgatgctcgtcaggggggcggagcctatggaaaaacgccagcaacgcggcctttttacggttcctggccttttgctggccttttgctcacatgttctttcctgcgttatcccctgattctgtggataaccgtattaccgcctttgagtgagctgataccgctcgccgcagccgaacgaccgagcgcagcgagtcagtgagcgaggaagcggaagagcgcccaatacgcaaaccgcctctccccgcgcgttggccgattcattaatgcagctggcacgacaggtttcccgactggaaagcgggcagtgagcgcaacgcaattaatgtgagttagctcactcattaggcaccccaggctttacactttatgcttccggctcgtatgttgtgtggaattgtgagcggataacaatttcacacaggaaacagctatgaccatgattacgccaagcttgcatgcctgcaggtcgactcgacgtacgtcctcgaagagaagggttaataacacattttttaacatttttaacacaaattttagttatttaaaaatttattaaaaaatttaaaataagaagaggaactctttaaataaatctaacttacaaaatttatgatttttaataagttttcaccaataaaaaatgtcataaaaatatgttaaaaagtatattatcaatattctctttatgataaataaaaagaaaaaaaaaataaaagttaagtgaaaatgagattgaagtgactttaggtgtgtataaatatatcaaccccgccaacaatttatttaatccaaatatattgaagtatattattccatagcctttatttatttatatatttattatataaaagctttatttgttctaggttgttcatgaaatatttttttggttttatctccgttgtaagaaaatcatgtgctttgtgtcgccactcactattgcagctttttcatgcattggtcagattgacggttgattgtatttttgttttttatggttttgtgttatgacttaagtcttcatctctttatctcttcatcaggtttgatggttacctaatatggtccatgggtacatgcatggttaaattaggtggccaactttgttgtgaacgatagaattttttttatattaagtaaactatttttatattatgaaataataataaaaaaaatattttatcattattaacaaaatcatattagttaatttgttaactctataataaaagaaatactgtaacattcacattacatggtaacatctttccaccctttcatttgttttttgtttgatgactttttttcttgtttaaatttatttcccttcttttaaatttggaatacattatcatcatatataaactaaaatactaaaaacaggattacacaaatgataaataataacacaaatatttataaatctagctgcaatatatttaaactagctatatcgatattgtaaaataaaactagctgcattgatactgataaaaaaatatcatgtgctttctggactgatgatgcagtatacttttgacattgcctttattttatttttcagaaaagctttcttagttctgggttcttcattatttgtttcccatctccattgtgaattgaatcatttgcttcgtgtcacaaatacaatttagntaggtacatgcattggtcagattcacggtttattatgtcatgacttaagttcatggtagtacattacctgccacgcatgcattatattggttagatttgataggcaaatttggttgtcaacaatataaatataaataatgtttttatattacgaaataacagtgatcaaaacaaacagttttatctttattaacaagattttgtttttgtttgatgacgttttttaatgtttacgctttcccccttcttttgaatttagaacactttatcatcataaaatcaaatactaaaaaaattacatatttcataaataataacacaaatatttttaaaaaatctgaaataataatgaacaatattacatattatcacgaaaattcattaataaaaatattatataaataaaatgtaatagtagttatatgtaggaaaaaagtactgcacgcataatatatacaaaaagattaaaatgaactattataaataataacactaaattaatggtgaatcatatcaaaataatgaaaaagtaaataaaatttgtaattaacttctatatgtattacacacacaaataataaataatagtaaaaaaaattatgataaatatttaccatctcataagatatttaaaataatgataaaaatatagattattttttatgcaactagctagccaaaaagagaacacgggtatatataaaaagagtacctttaaattctactgtacttcctttattcctgacgtttttatatcaagtggacatacgtgaagattttaattatcagtctaaatatttcattagcacttaatacttttctgttttattcctatcctataagtagtcccgattctcccaacattgcttattcacacaactaactaagaaagtcttccatagccccccaagcggccgcaaaccatggcttccgccgaattcaccgccgctgccgactctgtgcagaagcttcccaagactccttccgacgacgagcttcttgagctctacggactgtacaagcaggccaccgtcggcgacaacaacaccgaccgacccggcgccttcaacttcaaggccaagtacaagtgggacgcctgggacaagctcaagggcaagtctcaggaggaggctgagcaggagtacattgctcttgtccagaccctttccgacaagtacaactaagc

SEQ ID NO: 119 - DNA, 8172 bp, Artificial Sequence
  plasmid pFBAIN-YCPT1
catgggcgtattcattaaacaggagcagcttccggctctcaagaagtacaagtactccgccgaggatcactcgttcatctccaacaacattctgcgccccttctggcgacagtttgtcaaaatcttccctctgtggatggcccccaacatggtgactctgctgggcttcttctttgtcattgtgaacttcatcaccatgctcattgttgatcccacccacgaccgcgagcctcccagatgggtctacctcacctacgctctgggtctgttcctttaccagacatttgatgcctgtgacggatcccatgcccgacgaactggccagagtggaccccttggagagctgtttgaccactgtgtcgacgccatgaatacctctctgattctcacggtggtggtgtccaccacccatatgggatataacatgaagctactgattgtgcagattgccgctctcggaaacttctacctgtcgacctgggagacctaccataccggaactctgtacctttctggcttctctggtcctgttgaaggtatcttgattctggtggctcttttcgtcctcaccttcttcactggtcccaacgtgtacgctctgaccgtctacgaggctcttcccgagtccatcacttcgctgctgcctgccagcttcctggacgtcaccatcacccagatctacattggattcggagtgctgggcatggtgttcaacatctacggcgcctgcggaaacgtgatcaagtactacaacaacaagggcaagagcgctctccccgccattctcggaatcgccccctttggcatcttctacgtcggcgtctttgcctgggcccatgttgctcctctgcttctctccaagtacgccatcgtctatctgtttgccattggggctgcctttgccatgcaagtcggccagatgattcttgcccatctcgtgcttgctccctttccccactggaacgtgctgctcttcttcccctttgtgggactggcagtgcactacattgcacccgtgtttggctgggacgccgatatcgtgtcggttaacactctcttcacctgttttggcgccaccctctccatttacgccttctttgtgcttgagatcatcgacgagatcaccaactacctcgatatctggtgtctgcgaatcaagtaccctcaggagaagaagaccgaataagcggccgcaagtgtggatggggaagtgagtgcccggttctgtgtgcacaattggcaatccaagatggatggattcaacacagggatatagcgagctacgtggtggtgcgaggatatagcaacggatatttatgtttgacacttgagaatgtacgatacaagcactgtccaagtacaatactaaacatactgtacatactcatactcgtacccgggcaacggtttcacttgagtgcagtggctagtgctcttactcgtacagtgtgcaatactgcgtatcatagtctttgatgtatatcgtattcattcatgttagttgcgtacgagccggaagcataaagtgtaaagcctggggtgcctaatgagtgagctaactcacattaattgcgttgcgctcactgcccgctttccagtcgggaaacctgtcgtgccagctgcattaatgaatcggccaacgcgcggggagaggcggtttgcgtattgggcgctcttccgcttcctcgctcactgactcgctgcgctcggtcgttcggctgcggcgagcggtatcagctcactcaaaggcggtaatacggttatccacagaatcaggggataacgcaggaaagaacatgtgagcaaaaggccagcaaaaggccaggaaccgtaaaaaggccgcgttgctggcgtttttccataggctccgcccccctgacgagcatcacaaaaatcgacgctcaagtcagaggtggcgaaacccgacaggactataaagataccaggcgtttccccctggaagctccctcgtgcgctctcctgttccgaccctgccgcttaccggatacctgtccgcctttctcccttcgggaagcgtggcgctttctcatagctcacgctgtaggtatctcagttcggtgtaggtcgttcgctccaagctgggctgtgtgcacgaaccccccgttcagcccgaccgctgcgccttatccggtaactatcgtcttgagtccaacccggtaagacacgacttatcgccactggcagcagccactggtaacaggattagcagagcgaggtatgtaggcggtgctacagagttcttgaagtggtggcctaactacggctacactagaaggacagtatttggtatctgcgctctgctgaagccagttaccttcggaaaaagagttggtagctcttgatccggcaaacaaaccaccgctggtagcggtggtttttttgtttgcaagcagcagattacgcgcagaaaaaaaggatctcaagaagatcctttgatcttttctacggggtctgacgctcagtggaacgaaaactcacgttaagggattttggtcatgagattatcaaaaaggatcttcacctagatccttttaaattaaaaatgaagttttaaatcaatctaaagtatatatgagtaaacttggtctgacagttaccaatgcttaatcagtgaggcacctatctcagcgatctgtctatttcgttcatccatagttgcctgactccccgtcgtgtagataactacgatacgggagggcttaccatctggccccagtgctgcaatgataccgcgagacccacgctcaccggctccagatttatcagcaataaaccagccagccggaagggccgagcgcagaagtggtcctgcaactttatccgcctccatccagtctattaattgttgccgggaagctagagtaagtagttcgccagttaatagtttgcgcaacgttgttgccattgctacaggcatcgtggtgtcacgctcgtcgtttggtatggcttcattcagctccggttcccaacgatcaaggcgagttacatgatcccccatgttgtgcaaaaaagcggttagctccttcggtcctccgatcgttgtcagaagtaagttggccgcagtgttatcactcatggttatggcagcactgcataattctcttactgtcatgccatccgtaagatgcttttctgtgactggtgagtactcaaccaagtcattctgagaatagtgtatgcggcgaccgagttgctcttgcccggcgtcaatacgggataataccgcgccacatagcagaactttaaaagtgctcatcattggaaaacgttcttcggggcgaaaactctcaaggatcttaccgctgttgagatccagttcgatgtaacccactcgtgcacccaactgatcttcagcatcttttactttcaccagcgtttctgggtgagcaaaaacaggaaggcaaaatgccgcaaaaaagggaataagggcgacacggaaatgttgaatactcatactcttcctttttcaatattattgaagcatttatcagggttattgtctcatgagcggatacatatttgaatgtatttagaaaaataaacaaataggggttccgcgcacatttccccgaaaagtgccacctgacgcgccctgtagcggcgcattaagcgcggcgggtgtggtggttacgcgcagcgtgaccgctacacttgccagcgccctagcgcccgctcctttcgctttcttcccttcctttctcgccacgttcgccggctttccccgtcaagctctaaatcgggggctccctttagggttccgatttagtgctttacggcacctcgaccccaaaaaacttgattagggtgatggttcacgtagtgggccatcgccctgatagacggtttttcgccctttgacgttggagtccacgttctttaatagtggactcttgttccaaactggaacaacactcaaccctatctcggtctattcttttgatttataagggattttgccgatttcggcctattggttaaaaaatgagctgatttaacaaaaatttaacgcgaattttaacaaaatattaacgcttacaatttccattcgccattcaggctgcgcaactgttgggaagggcgatcggtgcgggcctcttcgctattacgccagctggcgaaagggggatgtgctgcaaggcgattaagttgggtaacgccagggttttcccagtcacgacgttgtaaaacgacggccagtgaattgtaatacgactcactatagggcgaattgggtaccgggccccccctcgaggtcgatggtgtcgataagcttgatatcgaattcatgtcacacaaaccgatcttcgcctcaaggaaacctaattctacatccgagagactgccgagatccagtctacactgattaattttcgggccaataatttaaaaaaatcgtgttatataatattatatgtattatatatatacatcatgatgatactgacagtcatgtcccattgctaaatagacagactccatctgccgcctccaactgatgttctcaatatttaaggggtcatctcgcattgtttaataataaacagactccatctaccgcctccaaatgatgttctcaaaatatattgtatgaacttatttttattacttagtattattagacaacttacttgctttatgaaaaacacttcctatttaggaaacaatttataatggcagttcgttcatttaacaatttatgtagaataaatgttataaatgcgtatgggaaatcttaaatatggatagcataaatgatatctgcattgcctaattcgaaatcaacagcaacgaaaaaaatcccttgtacaacataaatagtcatcgagaaatatcaactatcaaagaacagctattcacacgttactattgagattattattggacgagaatcacacactcaactgtctttctctcttctagaaatacaggtacaagtatgtactattctcattgttcatacttctagtcatttcatcccacatattccttggatttctctccaatgaatgacattctatcttgcaaattcaacaattataataagatataccaaagtagcggtatagtggcaatcaaaaagcttctctggtgtgcttctcgtatttatttttattctaatgatccattaaaggtatatatttatttcttgttatataatccttttgtttattacatgggctggatacataaaggtattttgatttaattttttgcttaaattcaatcccccctcgttcagtgtcaactgtaatggtaggaaattaccatacttttgaagaagcaaaaaaaatgaaagaaaaaaaaaatcgtatttccaggttagacgttccgcagaatctagaatgcggtatgcggtacattgttcttcgaacgtaaaagttgcgctccctgagatattgtacatttttgcttttacaagtacaagtacatcgtacaactatgtactactgttgatgcatccacaacagtttgttttgtttttttttgttttttttttttctaatgattcattaccgctatgtatacctacttgtacttgtagtaagccgggttattggcgttcaattaatcatagacttatgaatctgcacggtgtgcgctgcgagttacttttagcttatgcatgctacttgggtgtaatattgggatctgttcggaaatcaacggatgctcaatcgatttcgacagtaattaattaagtcatacacaagtcagctttcttcgagcctcatataagtataagtagttcaacgtattagcactgtacccagcatctccgtatcgagaaacacaacaacatgccccattggacagatcatgcggatacacaggttgtgcagtatcatacatactcgatcagacaggtcgtctgaccatcatacaagctgaacaagcgctccatacttgcacgctctctatatacacagttaaattacatatccatagtctaacctctaacagttaatcttctggtaagcctcccagccagccttctggtatcgcttggcctcctcaataggatctcggttctggccgtacagacctcggccgacaattatgatatccgttccggtagacatgacatcctcaacagttcggtactgctgtccgagagcgtctcccttgtcgtcaagacccaccccgggggtcagaataagccagtcctcagagtcgcccttaggtcggttctgggcaatgaagccaaccacaaactcggggtcggatcgggcaagctcaatggtctgcttggagtactcgccagtggccagagagcccttgcaagacagctcggccagcatgagcagacctctggccagcttctcgttgggagaggggactaggaactccttgtactgggagttctcgtagtcagagacgtcctccttcttctgttcagagacagtttcctcggcaccagctcgcaggccagcaatgattccggttccgggtacaccgtgggcgttggtgatatcggaccactcggcgattcggtgacaccggtactggtgcttgacagtgttgccaatatctgcgaactttctgtcctcgaacaggaagaaaccgtgcttaagagcaagttccttgagggggagcacagtgccggcgtaggtgaagtcgtcaatgatgtcgatatgggttttgatcatgcacacataaggtccgaccttatcggcaagctcaatgagctccttggtggtggtaacatccagagaagcacacaggttggttttcttggctgccacgagcttgagcactcgagcggcaaaggcggacttgtggacgttagctcgagcttcgtaggagggcattttggtggtgaagaggagactgaaataaatttagtctgcagaactttttatcggaaccttatctggggcagtgaagtatatgttatggtaatagttacgagttagttgaacttatagatagactggactatacggctatcggtccaaattagaaagaacgtcaatggctctctgggcgtcgcctttgccgacaaaaatgtgatcatgatgaaagccagcaatgacgttgcagctgatattgttgtcggccaaccgcgccgaaaacgcagctgtcagacccacagcctccaacgaagaatgtatcgtcaaagtgatccaagcacactcatagttggagtcgtactccaaaggcggcaatgacgagtcagacagatactcgtcgaaaacagtgtacgcagatctactatagaggaacatttaaattgccccggagaagacggccaggccgcctagatgacaaattcaacaactcacagctgactttctgccattgccactaggggggggcctttttatatggccaagccaagctctccacgtcggttgggctgcacccaacaataaatgggtagggttgcaccaacaaagggatgggatggggggtagaagatacgaggataacggggctcaatggcacaaataagaacgaatactgccattaagactcgtgatccagcgactgacaccattgcatcatctaagggcctcaaaactacctcggaactgctgcgctgatctggacaccacagaggttccgagcactttaggttgcaccaaatgtcccaccaggtgcaggcagaaaacgctggaacagcgtgtacagtttgtcttaacaaaaagtgagggcgctgaggtcgagcagggtggtgtgacttgttatagcctttagagctgcgaaagcgcgtatggatttggctcatcaggccagattgagggtctgtggacacatgtcatgttagtgtacttcaatcgccccctggatatagccccgacaataggccgtggcctcatttttttgccttccgcacatttccattgctcggtacccacaccttgcttctcctgcacttgccaaccttaatactggtttacattgaccaacatcttacaagcggggggcttgtctagggtatatataaacagtggctctcccaatcggttgccagtctcttttttcctttctttccccacagattcgaaatctaaactacacatcacagaattccgagccgtgagtatccacgacaagatcagtgtcgagacgacgcgttttgtgtaatgacacaatccgaaagtcgctagcaacacacactctctacacaaactaacccagctctggtac

SEQ ID NO: 120 - DNA, 4889 bp, Artificial Sequence
  plasmid pKR1247
gtacgtctagaggatcccccgggctgcaggaattcactggccgtcgttttacaacgtcgtgactgggaaaaccctggcgttacccaacttaatcgccttgcagcacatccccctttcgccagctggcgtaatagcgaagaggcccgcaccgatcgcccttcccaacagttgcgcagcctgaatggcgaatggcgcctgatgcggtattttctccttacgcatctgtgcggtatttcacaccgcatatggtgcactctcagtacaatctgctctgatgccgcatagttaagccagccccgacacccgccaacacccgctgacgcgccctgacgggcttgtctgctcccggcatccgcttacagacaagctgtgaccgtctccgggagctgcatgtgtcagaggttttcaccgtcatcaccgaaacgcgcgagacgaaagggcctcgtgatacgcctatttttataggttaatgtcatgataataatggtttcttagacgtcaggtggcacttttcggggaaatgtgcgcggaacccctatttgtttatttttctaaatacattcaaatatgtatccgctcatgagacaataaccctgataaatgcttcaataatattgaaaaaggaagagtatgagtattcaacatttccgtgtcgcccttattcccttttttgcggcattttgccttcctgtttttgctcacccagaaacgctggtgaaagtaaaagatgctgaagatcagttgggtgcacgagtgggttacatcgaactggatctcaacagcggtaagatccttgagagttttcgccccgaagaacgttttccaatgatgagcacttttaaagttctgctatgtggcgcggtattatcccgtattgacgccgggcaagagcaactcggtcgccgcatacactattctcagaatgacttggttgagtactcaccagtcacagaaaagcatcttacggatggcatgacagtaagagaattatgcagtgctgccataaccatgagtgataacactgcggccaacttacttctgacaacgatcggaggaccgaaggagctaaccgcttttttgcacaacatgggggatcatgtaactcgccttgatcgttgggaaccggagctgaatgaagccataccaaacgacgagcgtgacaccacgatgcctgtagcaatggcaacaacgttgcgcaaactattaactggcgaactacttactctagcttcccggcaacaattaatagactggatggaggcggataaagttgcaggaccacttctgcgctcggcccttccggctggctggtttattgctgataaatctggagccggtgagcgtgggtctcgcggtatcattgcagcactggggccagatggtaagccctcccgtatcgtagttatctacacgacggggagtcaggcaactatggatgaacgaaatagacagatcgctgagataggtgcctcactgattaagcattggtaactgtcagaccaagtttactcatatatactttagattgatttaaaacttcatttttaatttaaaaggatctaggtgaagatcctttttgataatctcatgaccaaaatcccttaacgtgagttttcgttccactgagcgtcagaccccgtagaaaagatcaaaggatcttcttgagatcctttttttctgcgcgtaatctgctgcttgcaaacaaaaaaaccaccgctaccagcggtggtttgtttgccggatcaagagctaccaactctttttccgaaggtaactggcttcagcagagcgcagataccaaatactgtccttctagtgtagccgtagttaggccaccacttcaagaactctgtagcaccgcctacatacctcgctctgctaatcctgttaccagtggctgctgccagtggcgataagtcgtgtcttaccgggttggactcaagacgatagttaccggataaggcgcagcggtcgggctgaacggggggttcgtgcacacagcccagcttggagcgaacgacctacaccgaactgagatacctacagcgtgagctatgagaaagcgccacgcttcccgaagggagaaaggcggacaggtatccggtaagcggcagggtcggaacaggagagcgcacgagggagcttccagggggaaacgcctggtatctttatagtcctgtcgggtttcgccacctctgacttgagcgtcgatttttgtgatgctcgtcaggggggcggagcctatggaaaaacgccagcaacgcggcctttttacggttcctggccttttgctggccttttgctcacatgttctttcctgcgttatcccctgattctgtggataaccgtattaccgcctttgagtgagctgataccgctcgccgcagccgaacgaccgagcgcagcgagtcagtgagcgaggaagcggaagagcgcccaatacgcaaaccgcctctccccgcgcgttggccgattcattaatgcagctggcacgacaggtttcccgactggaaagcgggcagtgagcgcaacgcaattaatgtgagttagctcactcattaggcaccccaggctttacactttatgcttccggctcgtatgttgtgtggaattgtgagcggataacaatttcacacaggaaacagctatgaccatgattacgccaagcttgcatgcctgcaggctagcctaagtacgtactcaaaatgccaacaaataaaaaaaaagttgctttaataatgccaaaacaaattaataaaacacttacaacaccggattttttttaattaaaatgtgccatttaggataaatagttaatatttttaataattatttaaaaagccgtatctactaaaatgatttttatttggttgaaaatattaatatgtttaaatcaacacaatctatcaaaattaaactaaaaaaaaaataagtgtacgtggttaacattagtacagtaatataagaggaaaatgagaaattaagaaattgaaagcgagtctaatttttaaattatgaacctgcatatataaaaggaaagaaagaatccaggaagaaaagaaatgaaaccatgcatggtcccctcgtcatcacgagtttctgccatttgcaatagaaacactgaaacacctttctctttgtcacttaattgagatgccgaagccacctcacaccatgaacttcatgaggtgtagcacccaaggcttccatagccatgcatactgaagaatgtctcaagctcagcaccctacttctgtgacgtgtccctcattcaccttcctctcttccctataaataaccacgcctcaggttctccgcttcacaactcaaacattctctccattggtccttaaacactcatcagtcatcaccgcggccgcaaaccatgggcgtattcattaaacaggagcagcttccggctctcaagaagtacaagtactccgccgaggatcactcgttcatctccaacaacattctgcgccccttctggcgacagtttgtcaaaatcttccctctgtggatggcccccaacatggtgactctgctgggcttcttctttgtcattgtgaacttcatcaccatgctcattgttgatcccacccacgaccgcgagcctcccagatgggtctacctcacctacgctctgggtctgttcctttaccagacatttgatgcctgtgacggatcccatgcccgacgaactggccagagtggaccccttggagagctgtttgaccactgtgtcgacgccatgaatacctctctgattctcacggtggtggtgtccaccacccatatgggatataacatgaagctactgattgtgcagattgccgctctcggaaacttctacctgtcgacctgggagacctaccataccggaactctgtacctttctggcttctctggtcctgttgaaggtatcttgattctggtggctcttttcgtcctcaccttcttcactggtcccaacgtgtacgctctgaccgtctacgaggctcttcccgagtccatcacttcgctgctgcctgccagcttcctggacgtcaccatcacccagatctacattggattcggagtgctgggcatggtgttcaacatctacggcgcctgcggaaacgtgatcaagtactacaacaacaagggcaagagcgctctccccgccattctcggaatcgccccctttggcatcttctacgtcggcgtctttgcctgggcccatgttgctcctctgcttctctccaagtacgccatcgtctatctgtttgccattggggctgcctttgccatgcaagtcggccagatgattcttgcccatctcgtgcttgctccctttccccactggaacgtgctgctcttcttcccctttgtgggactggcagtgcactacattgcacccgtgtttggctgggacgccgatatcgtgtcggttaacactctcttcacctgttttggcgccaccctctccatttacgccttctttgtgcttgagatcatcgacgagatcaccaactacctcgatatctggtgtctgcgaatcaagtaccctcaggagaagaagaccgaataagcggccgcaagtgtggatggggaagtgagtgcccggttctgtgtgcacaattggcaatccaagatggatggattcaacacagggatatagcgagctacgtggtggtgcgaggatatagcaacggatatttatgtttgacacttgagaatgtacgatacaagcactgtccaagtacaatactaaacatactgtacatactcatactcgtacccgggcaacggtttcacttgagtgcagtggctagtgctcttactcgtacagtgtgcaatactgcgtatcatagtctttgatgtatatcgtattcattcatgttagttgc

SEQ ID NO: 121 - DNA, 6450 bp, Artificial Sequence
  plasmid pKR1251
  misc_feature (4340)..(4340): n is a, c, g, or t
ggccgcgacacaagtgtgagagtactaaataaatgctttggttgtacgaaatcattacactaaataaaataatcaaagcttatatatgccttccgctaaggccgaatgcaaagaaattggttctttctcgttatcttttgccacttttactagtacgtattaattactacttaatcatctttgtttacggctcattatatccggtctagaggatccaaggccgcgaagttaaaagcaatgttgtcacttgtcgtactaacacatgatgtgatagtttatgctagctagctataacataagctgtctctgagtgtgttgtatattaataaagatcatcactggtgaatggtgatcgtgtacgtaccctacttagtaggcaatggaagcacttagagtgtgctttgtgcatggccttgcctctgttttgagacttttgtaatgttttcgagtttaaatctttgcctttgcgtacgtgggcggatcccccgggctgcaggaattcactggccgtcgttttacaacgtcgtgactgggaaaaccctggcgttacccaacttaatcgccttgcagcacatccccctttcgccagctggcgtaatagcgaagaggcccgcaccgatcgcccttcccaacagttgcgcagcctgaatggcgaatggcgcctgatgcggtattttctccttacgcatctgtgcggtatttcacaccgcatatggtgcactctcagtacaatctgctctgatgccgcatagttaagccagccccgacacccgccaacacccgctgacgcgccctgacgggcttgtctgctcccggcatccgcttacagacaagctgtgaccgtctccgggagctgcatgtgtcagaggttttcaccgtcatcaccgaaacgcgcgagacgaaagggcctcgtgatacgcctatttttataggttaatgtcatgataataatggtttcttagacgtcaggtggcacttttcggggaaatgtgcgcggaacccctatttgtttatttttctaaatacattcaaatatgtatccgctcatgagacaataaccctgataaatgcttcaataatattgaaaaaggaagagtatgagtattcaacatttccgtgtcgcccttattcccttttttgcggcattttgccttcctgtttttgctcacccagaaacgctggtgaaagtaaaagatgctgaagatcagttgggtgcacgagtgggttacatcgaactggatctcaacagcggtaagatccttgagagttttcgccccgaagaacgttttccaatgatgagcacttttaaagttctgctatgtggcgcggtattatcccgtattgacgccgggcaagagcaactcggtcgccgcatacactattctcagaatgacttggttgagtactcaccagtcacagaaaagcatcttacggatggcatgacagtaagagaattatgcagtgctgccataaccatgagtgataacactgcggccaacttacttctgacaacgatcggaggaccgaaggagctaaccgcttttttgcacaacatgggggatcatgtaactcgccttgatcgttgggaaccggagctgaatgaagccataccaaacgacgagcgtgacaccacgatgcctgtagcaatggcaacaacgttgcgcaaactattaactggcgaactacttactctagcttcccggcaacaattaatagactggatggaggcggataaagttgcaggaccacttctgcgctcggcccttccggctggctggtttattgctgataaatctggagccggtgagcgtgggtctcgcggtatcattgcagcactggggccagatggtaagccctcccgtatcgtagttatctacacgacggggagtcaggcaactatggatgaacgaaatagacagatcgctgagataggtgcctcactgattaagcattggtaactgtcagaccaagtttactcatatatactttagattgatttaaaacttcatttttaatttaaaaggatctaggtgaagatcctttttgataatctcatgaccaaaatcccttaacgtgagttttcgttccactgagcgtcagaccccgtagaaaagatcaaaggatcttcttgagatcctttttttctgcgcgtaatctgctgcttgcaaacaaaaaaaccaccgctaccagcggtggtttgtttgccggatcaagagctaccaactctttttccgaaggtaactggcttcagcagagcgcagataccaaatactgtccttctagtgtagccgtagttaggccaccacttcaagaactctgtagcaccgcctacatacctcgctctgctaatcctgttaccagtggctgctgccagtggcgataagtcgtgtcttaccgggttggactcaagacgatagttaccggataaggcgcagcggtcgggctgaacggggggttcgtgcacacagcccagcttggagcgaacgacctacaccgaactgagatacctacagcgtgagctatgagaaagcgccacgcttcccgaagggagaaaggcggacaggtatccggtaagcggcagggtcggaacaggagagcgcacgagggagcttccagggggaaacgcctggtatctttatagtcctgtcgggtttcgccacctctgacttgagcgtcgatttttgtgatgctcgtcaggggggcggagcctatggaaaaacgccagcaacgcggcctttttacggttcctggccttttgctggccttttgctcacatgttctttcctgcgttatcccctgattctgtggataaccgtattaccgcctttgagtgagctgataccgctcgccgcagccgaacgaccgagcgcagcgagtcagtgagcgaggaagcggaagagcgcccaatacgcaaaccgcctctccccgcgcgttggccgattcattaatgcagctggcacgacaggtttcccgactggaaagcgggcagtgagcgcaacgcaattaatgtgagttagctcactcattaggcaccccaggctttacactttatgcttccggctcgtatgttgtgtggaattgtgagcggataacaatttcacacaggaaacagctatgaccatgattacgccaagcttgcatgcctgcaggtcgactcgacgtacgtcctcgaagagaagggttaataacacattttttaacatttttaacacaaattttagttatttaaaaatttattaaaaaatttaaaataagaagaggaactctttaaataaatctaacttacaaaatttatgatttttaataagttttcaccaataaaaaatgtcataaaaatatgttaaaaagtatattatcaatattctctttatgataaataaaaagaaaaaaaaaataaaagttaagtgaaaatgagattgaagtgactttaggtgtgtataaatatatcaaccccgccaacaatttatttaatccaaatatattgaagtatattattccatagcctttatttatttatatatttattatataaaagctttatttgttctaggttgttcatgaaatatttttttggttttatctccgttgtaagaaaatcatgtgctttgtgtcgccactcactattgcagctttttcatgcattggtcagattgacggttgattgtatttttgttttttatggttttgtgttatgacttaagtcttcatctctttatctcttcatcaggtttgatggttacctaatatggtccatgggtacatgcatggttaaattaggtggccaactttgttgtgaacgatagaattttttttatattaagtaaactatttttatattatgaaataataataaaaaaaatattttatcattattaacaaaatcatattagttaatttgttaactctataataaaagaaatactgtaacattcacattacatggtaacatctttccaccctttcatttgttttttgtttgatgactttttttcttgtttaaatttatttcccttcttttaaatttggaatacattatcatcatatataaactaaaatactaaaaacaggattacacaaatgataaataataacacaaatatttataaatctagctgcaatatatttaaactagctatatcgatattgtaaaataaaactagctgcattgatactgataaaaaaatatcatgtgctttctggactgatgatgcagtatacttttgacattgcctttattttatttttcagaaaagctttcttagttctgggttcttcattatttgtttcccatctccattgtgaattgaatcatttgcttcgtgtcacaaatacaatttagntaggtacatgcattggtcagattcacggtttattatgtcatgacttaagttcatggtagtacattacctgccacgcatgcattatattggttagatttgataggcaaatttggttgtcaacaatataaatataaataatgtttttatattacgaaataacagtgatcaaaacaaacagttttatctttattaacaagattttgtttttgtttgatgacgttttttaatgtttacgctttcccccttcttttgaatttagaacactttatcatcataaaatcaaatactaaaaaaattacatatttcataaataataacacaaatatttttaaaaaatctgaaataataatgaacaatattacatattatcacgaaaattcattaataaaaatattatataaataaaatgtaatagtagttatatgtaggaaaaaagtactgcacgcataatatatacaaaaagattaaaatgaactattataaataataacactaaattaatggtgaatcatatcaaaataatgaaaaagtaaataaaatttgtaattaacttctatatgtattacacacacaaataataaataatagtaaaaaaaattatgataaatatttaccatctcataagatatttaaaataatgataaaaatatagattattttttatgcaactagctagccaaaaagagaacacgggtatatataaaaagagtacctttaaattctactgtacttcctttattcctgacgtttttatatcaagtggacatacgtgaagattttaattatcagtctaaatatttcattagcacttaatacttttctgttttattcctatcctataagtagtcccgattctcccaacattgcttattcacacaactaactaagaaagtcttccatagccccccaagcggccgcaaaccatgggcgtattcattaaacaggagcagcttccggctctcaagaagtacaagtactccgccgaggatcactcgttcatctccaacaacattctgcgccccttctggcgacagtttgtcaaaatcttccctctgtggatggcccccaacatggtgactctgctgggcttcttctttgtcattgtgaacttcatcaccatgctcattgttgatcccacccacgaccgcgagcctcccagatgggtctacctcacctacgctctgggtctgttcctttaccagacatttgatgcctgtgacggatcccatgcccgacgaactggccagagtggaccccttggagagctgtttgaccactgtgtcgacgccatgaatacctctctgattctcacggtggtggtgtccaccacccatatgggatataacatgaagctactgattgtgcagattgccgctctcggaaacttctacctgtcgacctgggagacctaccataccggaactctgtacctttctggcttctctggtcctgttgaaggtatcttgattctggtggctcttttcgtcctcaccttcttcactggtcccaacgtgtacgctctgaccgtctacgaggctcttcccgagtccatcacttcgctgctgcctgccagcttcctggacgtcaccatcacccagatctacattggattcggagtgctgggcatggtgttcaacatctacggcgcctgcggaaacgtgatcaagtactacaacaacaagggcaagagcgctctccccgccattctcggaatcgccccctttggcatcttctacgtcggcgtctttgcctgggcccatgttgctcctctgcttctctccaagtacgccatcgtctatctgtttgccattggggctgcctttgccatgcaagtcggccagatgattcttgcccatctcgtgcttgctccctttccccactggaacgtgctgctcttcttcccctttgtgggactggcagtgcactacattgcacccgtgtttggctgggacgccgatatcgtgtcggttaacactctcttcacctgttttggcgccaccctctccatttacgccttctttgtgcttgagatcatcgacgagatcaccaactacctcgatatctggtgtctgcgaatcaagtaccctcaggagaagaagaccgaataagc

SEQ ID NO: 122 - DNA, 2184 bp, Yarrowia lipolytica
atgtccgaaaccgaccatctgctggccgccgagcccgtggctgagtacccccagtacacgccttggcccaactcccgaaaatcagtggacacggagttttccgcaacctcgtggatttacgacttggttctgtggattttcacggcttgctttgacatttttttcagagaaatccggccacgtggtgccttccgaatccccagaaagggccccgtgctgttcgtggctgccccccacgcaaaccagtttgtggaccccgtcatcctcatgaaccaggtcaaacaggaggccggacgacgaatctccttccttgtggccgagaagtccatgcgacgagctgcagtcggacgaatggcccgaagcatgaactcaattcctgtcgtgcgagctcaggacaatgcaaaaaagggagagggaaagatttacgtcgacgcagaggaccccacaaagatccacggaatcggcacccagttcacgaagcagtgcgaggtgcgaggcctcgtggtctgctcgtcctctgtcggctcaattgacgtggctgagattgtgtccgacactctgctcattgcaagaaaggaattcaagggccccaaagccaaggaggctctcaaggaatccaacggaggaatcacatacaagtacgccgactacgtcaaccaggccacagtctaccgatccgtattcgacaaattgcaccatggaggctgtgtgggtatcttcccagagggaggatctcatgaccgaaccgaactgctgccccttaaggccggtgttgctatcatggctctgggggctctcgcagaggacccctcttgtggtgtgcgaatcgtcccctgtggtctcaactacttccacgcccacaagttccgatctcgggccgtggtggagtttggctctcctattgccattcctccggatctcgtggagaagtacaaggcaggaggagaggccaagcgggaggctgtcaagaccgttctagacattactgccgctggtctcaagtctgtgactgttcaggtgcaggatttcgacaccctgatgctgatccaggccattcgacgactctaccgacctcccggaaagaagattcctctgcccatggttgtagagctcaaccgtcgacttgtatacgcctacaaccactacaaggacgatccccgtatcgaggagatgaagcaggagattcgaaagtacaacaagttcctgcaggccatgggtctcaaggaccatcaggtagagaaggcccgaatctccaagattgagattctgggccggcttctgtaccggtccatcaagcttgtgttcttgtccattggctgtctccccggtctgcttttgttttctcccatcttcatcatttctaagtccatttccaaaaccaaggccaaggaggctctcaaggcctccagtgtcaaaatcaaggctaacgatgtggttgccacttggaaggtgctggttgcaatgggtctgaccccagttctttacattctctattcactggttggatctgtggtgattcgaaagctcgatctcatctcctggttccccacaattcttcttcccggcctcgttttaagcatcatcatcacaacctcatacgccgccctggctatgggagaggccggtatggacattttcaagtctcttcgaccacttgcattggctctcaacccttccaccaaaaactctctgctcaagctgcaaaatgaacgaaagcgacttgtgctcaagtcttccgagctcgttacctctttgggccctgagctgttccccgacttccccgagaactccattctgcagggaagcgataagtttgaggacgaggagaactacgaaaacgagaagcgatcgcattccagatccacttctgccacttctctatctgccatgagcgagggagacggtgatgagcttgttcgggaggtccgaaagggtgctagctacttccctgtgagtaccatttctgaggacgaagaccaagccatctcgcgagtgggctctgaggcatctcttgctgacattcctctgtttggtatgtcccgatcacaatctggagcttctctttcggaagcctccacacacggctcttctactggagctgatgccgaggaggctaagacggaggtgactcgcagaattgcattggcgatggaggaaaaacgacgagagcaggatgaggaataa

SEQ ID NO: 123 - protein, 727 aa, Yarrowia lipolytica
MSETDHLLAAEPVAEYPQYTPWPNSRKSVDTEFSATSWIYDLVLWIFTACFDIFFREIRPRGAFRIPRKGPVLFVAAPHANQFVDPVILMNQVKQEAGRRISFLVAEKSMRRAAVGRMARSMNSIPVVRAQDNAKKGEGKIYVDAEDPTKIHGIGTQFTKQCEVRGLVVCSSSVGSIDVAEIVSDTLLIARKEFKGPKAKEALKESNGGITYKYADYVNQATVYRSVFDKLHHGGCVGIFPEGGSHDRTELLPLKAGVAIMALGALAEDPSCGVRIVPCGLNYFHAHKFRSRAVVEFGSPIAIPPDLVEKYKAGGEAKREAVKTVLDITAAGLKSVTVQVQDFDTLMLIQAIRRLYRPPGKKIPLPMVVELNRRLVYAYNHYKDDPRIEEMKQEIRKYNKFLQAMGLKDHQVEKARISKIEILGRLLYRSIKLVFLSIGCLPGLLLFSPIFIISKSISKTKAKEALKASSVKIKANDVVATWKVLVAMGLTPVLYILYSLVGSVVIRKLDLISWFPTILLPGLVLSIIITTSYAALAMGEAGMDIFKSLRPLALALNPSTKNSLLKLQNERKRLVLKSSELVTSLGPELFPDFPENSILQGSDKFEDEENYENEKRSHSRSTSATSLSAMSEGDGDELVREVRKGASYFPVSTISEDEDQAISRVGSEASLADIPLFGMSRSQSGASLSEASTHGSSTGADAEEAKTEVTRRIALAMEEKRREQDEE

SEQ ID NO: 124 - DNA, 33 bp, Artificial Sequence
  primer YlGPAT-5
gcggccgcaccatgtccgaaaccgaccatctgc

SEQ ID NO: 125 - DNA, 30 bp, Artificial Sequence
  primer YlGPAT-3
tgcggccgcttattcctcatcctgctctcg

SEQ ID NO: 126 - DNA, 5715 bp, Artificial Sequence
  plasmid PCRblunt-YlGPAt
ttgtaatacgactcactatagggcgaattgggccctctagatgcatgctcgagcggccgccagtgtgatggatatctgcagaattcagggcggccgcttattcctcatcctgctctcgtcgtttttcctccatcgccaatgcaattctgcgagtcacctccgtcttagcctcctcggcatcagctccagtagaagagccgtgtgtggaggcttccgaaagagaagctccagattgtgatcgggacataccaaacagaggaatgtcagcaagagatgcctcagagcccactcgcgagatggcttggtcttcgtcctcagaaatggtactcacagggaagtagctagcaccctttcggacctcccgaacaagctcatcaccgtctccctcgctcatggcagatagagaagtggcagaagtggatctggaatgcgatcgcttctcgttttcgtagttctcctcgtcctcaaacttatcgcttccctgcagaatggagttctcggggaagtcggggaacagctcagggcccaaagaggtaacgagctcggaagacttgagcacaagtcgctttcgttcattttgcagcttgagcagagagtttttggtggaagggttgagagccaatgcaagtggtcgaagagacttgaaaatgtccataccggcctctcccatagccagggcggcgtatgaggttgtgatgatgatgcttaaaacgaggccgggaagaagaattgtggggaaccaggagatgagatcgagctttcgaatcaccacagatccaaccagtgaatagagaatgtaaagaactggggtcagacccattgcaaccagcaccttccaagtggcaaccacatcgttagccttgattttgacactggaggccttgagagcctccttggccttggttttggaaatggacttagaaatgatgaagatgggagaaaacaaaagcagaccggggagacagccaatggacaagaacacaagcttgatggaccggtacagaagccggcccagaatctcaatcttggagattcgggccttctctacctgatggtccttgagacccatggcctgcaggaacttgttgtactttcgaatctcctgcttcatctcctcgatacggggatcgtccttgtagtggttgtaggcgtatacaagtcgacggttgagctctacaaccatgggcagaggaatcttctttccgggaggtcggtagagtcgtcgaatggcctggatcagcatcagggtgtcgaaatcctgcacctgaacagtcacagacttgagaccagcggcagtaatgtctagaacggtcttgacagcctcccgcttggcctctcctcctgccttgtacttctccacgagatccggaggaatggcaataggagagccaaactccaccacggcccgagatcggaacttgtgggcgtggaagtagttgagaccacaggggacgattcgcacaccacaagaggggtcctctgcgagagcccccagagccatgatagcaacaccggccttaaggggcagcagttcggttcggtcatgagatcctccctctgggaagatacccacacagcctccatggtgcaatttgtcgaatacggatcggtagactgtggcctggttgacgtagtcggcgtacttgtatgtgattcctccgttggattccttgagagcctccttggctttggggcccttgaattcctttcttgcaatgagcagagtgtcggacacaatctcagccacgtcaattgagccgacagaggacgagcagaccacgaggcctcgcacctcgcactgcttcgtgaactgggtgccgattccgtggatctttgtggggtcctctgcgtcgacgtaaatctttccctctcccttttttgcattgtcctgagctcgcacgacaggaattgagttcatgcttcgggccattcgtccgactgcagctcgtcgcatggacttctcggccacaaggaaggagattcgtcgtccggcctcctgtttgacctggttcatgaggatgacggggtccacaaactggtttgcgtggggggcagccacgaacagcacggggccctttctggggattcggaaggcaccacgtggccggatttctctgaaaaaaatgtcaaagcaagccgtgaaaatccacagaaccaagtcgtaaatccacgaggttgcggaaaactccgtgtccactgattttcgggagttgggccaaggcgtgtactgggggtactcagccacgggctcggcggccagcagatggtcggtttcggacatggtgcggccgccctgaattccagcacactggcggccgttactagtggatccgagctcggtaccaagcttgatgcatagcttgagtattctaacgcgtcacctaaatagcttggcgtaatcatggtcatagctgtttcctgtgtgaaattgttatccgctcacaattccacacaacatacgagccggaagcataaagtgtaaagcctggggtgcctaatgagtgagctaactcacattaattgcgttgcgctcactgcccgctttccagtcgggaaacctgtcgtgccagctgcattaatgaatcggccaacgcgcggggagaggcggtttgcgtattgggcgctcttccgcttcctcgctcactgactcgctgcgctcggtcgttcggctgcggcgagcggtatcagctcactcaaaggcggtaatacggttatccacagaatcaggggataacgcaggaaagaacatgtgagcaaaaggccagcaaaaggccaggaaccgtaaaaaggccgcgttgctggcgtttttccataggctccgcccccctgacgagcatcacaaaaatcgacgctcaagtcagaggtggcgaaacccgacaggactataaagataccaggcgtttccccctggaagctccctcgtgcgctctcctgttccgaccctgccgcttaccggatacctgtccgcctttctcccttcgggaagcgtggcgctttctcatagctcacgctgtaggtatctcagttcggtgtaggtcgttcgctccaagctgggctgtgtgcacgaaccccccgttcagcccgaccgctgcgccttatccggtaactatcgtcttgagtccaacccggtaagacacgacttatcgccactggcagcagccactggtaacaggattagcagagcgaggtatgtaggcggtgctacagagttcttgaagtggtggcctaactacggctacactagaagaacagtatttggtatctgcgctctgctgaagccagttaccttcggaaaaagagttggtagctcttgatccggcaaacaaaccaccgctggtagcggtggtttttttgtttgcaagcagcagattacgcgcagaaaaaaaggatctcaagaagatcctttgatcttttctacggggtctgacgctcagtggaacgaaaactcacgttaagggattttggtcatgagattatcaaaaaggatcttcacctagatccttttaaattaaaaatgaagttttagcacgtgtcagtcctgctcctcggccacgaagtgcacgcagttgccggccgggtcgcgcagggcgaactcccgcccccacggctgctcgccgatctcggtcatggccggcccggaggcgtcccggaagttcgtggacacgacctccgaccactcggcgtacagctcgtccaggccgcgcacccacacccaggccagggtgttgtccggcaccacctggtcctggaccgcgctgatgaacagggtcacgtcgtcccggaccacaccggcgaagtcgtcctccacgaagtcccgggagaacccgagccggtcggtccagaactcgaccgctccggcgacgtcgcgcgcggtgagcaccggaacggcactggtcaacttggccatggtggccctcctcacgtgctattattgaagcatttatcagggttattgtctcatgagcggatacatatttgaatgtatttagaaaaataaacaaataggggttccgcgcacatttccccgaaaagtgccacctgatgcggtgtgaaataccgcacagatgcgtaaggagaaaataccgcatcaggaaattgtaagcgttaataattcagaagaactcgtcaagaaggcgatagaaggcgatgcgctgcgaatcgggagcggcgataccgtaaagcacgaggaagcggtcagcccattcgccgccaagctcttcagcaatatcacgggtagccaacgctatgtcctgatagcggtccgccacacccagccggccacagtcgatgaatccagaaaagcggccattttccaccatgatattcggcaagcaggcatcgccatgggtcacgacgagatcctcgccgtcgggcatgctcgccttgagcctggcgaacagttcggctggcgcgagcccctgatgctcttcgtccagatcatcctgatcgacaagaccggcttccatccgagtacgtgctcgctcgatgcgatgtttcgcttggtggtcgaatgggcaggtagccggatcaagcgtatgcagccgccgcattgcatcagccatgatggatactttctcggcaggagcaaggtgagatgacaggagatcctgccccggcacttcgcccaatagcagccagtcccttcccgcttcagtgacaacgtcgagcacagctgcgcaaggaacgcccgtcgtggccagccacgatagccgcgctgcctcgtcttgcagttcattcagggcaccggacaggtcggtcttgacaaaaagaaccgggcgcccctgcgctgacagccggaacacggcggcatcagagcagccgattgtctgttgtgcccagtcatagccgaatagcctctccacccaagcggccggagaacctgcgtgcaatccatcttgttcaatcatgcgaaacgatcctcatcctgtctcttgatcagagcttgatcccctgcgccatcagatccttggcggcaagaaagccatccagtttactttgcagggcttcccaaccttaccagagggcgccccagctggcaattccggttcgcttgctgtccataaaaccgcccagtctagctatcgccatgtaagcccactgcaagctacctgctttctctttgcgcttgcgttttcccttgtccagatagcccagtagctgacattcatccggggtcagcaccgtttctgcggactggctttctacgtgaaaaggatctaggtgaagatcctttttgataatctcatgcctgacatttatattccccagaacatcaggttaatggcgtttttgatgtcattttcgcggtggctgagatcagccacttcttccccgataacggagaccggcacactggccatatcggtggtcatcatgcgccagctttcatccccgatatgcaccaccgggtaaagttcacgggagactttatctgacagcagacgtgcactggccagggggatcaccatccgtcgccccggcgtgtcaataatatcactctgtacatccacaaacagacgataacggctctctcttttataggtgtaaaccttaaactgccgtacgtataggctgcgcaactgttgggaagggcgatcggtgcgggcctcttcgctattacgccagctggcgaaagggggatgtgctgcaaggcgattaagttgggtaacgccagggttttcccagtcacgacgttgtaaaacgacggccagtgaa

SEQ ID NO: 127 - DNA, 7447 bp, Artificial Sequence
  plasmid pKR1257
  misc_feature (4340)..(4340): n is a, c, g, or t
ggccgcgacacaagtgtgagagtactaaataaatgctttggttgtacgaaatcattacactaaataaaataatcaaagcttatatatgccttccgctaaggccgaatgcaaagaaattggttctttctcgttatcttttgccacttttactagtacgtattaattactacttaatcatctttgtttacggctcattatatccggtctagaggatccaaggccgcgaagttaaaagcaatgttgtcacttgtcgtactaacacatgatgtgatagtttatgctagctagctataacataagctgtctctgagtgtgttgtatattaataaagatcatcactggtgaatggtgatcgtgtacgtaccctacttagtaggcaatggaagcacttagagtgtgctttgtgcatggccttgcctctgttttgagacttttgtaatgttttcgagtttaaatctttgcctttgcgtacgtgggcggatcccccgggctgcaggaattcactggccgtcgttttacaacgtcgtgactgggaaaaccctggcgttacccaacttaatcgccttgcagcacatccccctttcgccagctggcgtaatagcgaagaggcccgcaccgatcgcccttcccaacagttgcgcagcctgaatggcgaatggcgcctgatgcggtattttctccttacgcatctgtgcggtatttcacaccgcatatggtgcactctcagtacaatctgctctgatgccgcatagttaagccagccccgacacccgccaacacccgctgacgcgccctgacgggcttgtctgctcccggcatccgcttacagacaagctgtgaccgtctccgggagctgcatgtgtcagaggttttcaccgtcatcaccgaaacgcgcgagacgaaagggcctcgtgatacgcctatttttataggttaatgtcatgataataatggtttcttagacgtcaggtggcacttttcggggaaatgtgcgcggaacccctatttgtttatttttctaaatacattcaaatatgtatccgctcatgagacaataaccctgataaatgcttcaataatattgaaaaaggaagagtatgagtattcaacatttccgtgtcgcccttattcccttttttgcggcattttgccttcctgtttttgctcacccagaaacgctggtgaaagtaaaagatgctgaagatcagttgggtgcacgagtgggttacatcgaactggatctcaacagcggtaagatccttgagagttttcgccccgaagaacgttttccaatgatgagcacttttaaagttctgctatgtggcgcggtattatcccgtattgacgccgggcaagagcaactcggtcgccgcatacactattctcagaatgacttggttgagtactcaccagtcacagaaaagcatcttacggatggcatgacagtaagagaattatgcagtgctgccataaccatgagtgataacactgcggccaacttacttctgacaacgatcggaggaccgaaggagctaaccgcttttttgcacaacatgggggatcatgtaactcgccttgatcgttgggaaccggagctgaatgaagccataccaaacgacgagcgtgacaccacgatgcctgtagcaatggcaacaacgttgcgcaaactattaactggcgaactacttactctagcttcccggcaacaattaatagactggatggaggcggataaagttgcaggaccacttctgcgctcggcccttccggctggctggtttattgctgataaatctggagccggtgagcgtgggtctcgcggtatcattgcagcactggggccagatggtaagccctcccgtatcgtagttatctacacgacggggagtcaggcaactatggatgaacgaaatagacagatcgctgagataggtgcctcactgattaagcattggtaactgtcagaccaagtttactcatatatactttagattgatttaaaacttcatttttaatttaaaaggatctaggtgaagatcctttttgataatctcatgaccaaaatcccttaacgtgagttttcgttccactgagcgtcagaccccgtagaaaagatcaaaggatcttcttgagatcctttttttctgcgcgtaatctgctgcttgcaaacaaaaaaaccaccgctaccagcggtggtttgtttgccggatcaagagctaccaactctttttccgaaggtaactggcttcagcagagcgcagataccaaatactgtccttctagtgtagccgtagttaggccaccacttcaagaactctgtagcaccgcctacatacctcgctctgctaatcctgttaccagtggctgctgccagtggcgataagtcgtgtcttaccgggttggactcaagacgatagttaccggataaggcgcagcggtcgggctgaacggggggttcgtgcacacagcccagcttggagcgaacgacctacaccgaactgagatacctacagcgtgagctatgagaaagcgccacgcttcccgaagggagaaaggcggacaggtatccggtaagcggcagggtcggaacaggagagcgcacgagggagcttccagggggaaacgcctggtatctttatagtcctgtcgggtttcgccacctctgacttgagcgtcgatttttgtgatgctcgtcaggggggcggagcctatggaaaaacgccagcaacgcggcctttttacggttcctggccttttgctggccttttgctcacatgttctttcctgcgttatcccctgattctgtggataaccgtattaccgcctttgagtgagctgataccgctcgccgcagccgaacgaccgagcgcagcgagtcagtgagcgaggaagcggaagagcgcccaatacgcaaaccgcctctccccgcgcgttggccgattcattaatgcagctggcacgacaggtttcccgactggaaagcgggcagtgagcgcaacgcaattaatgtgagttagctcactcattaggcaccccaggctttacactttatgcttccggctcgtatgttgtgtggaattgtgagcggataacaatttcacacaggaaacagctatgaccatgattacgccaagcttgcatgcctgcaggtcgactcgacgtacgtcctcgaagagaagggttaataacacattttttaacatttttaacacaaattttagttatttaaaaatttattaaaaaatttaaaataagaagaggaactctttaaataaatctaacttacaaaatttatgatttttaataagttttcaccaataaaaaatgtcataaaaatatgttaaaaagtatattatcaatattctctttatgataaataaaaagaaaaaaaaaataaaagttaagtgaaaatgagattgaagtgactttaggtgtgtataaatatatcaaccccgccaacaatttatttaatccaaatatattgaagtatattattccatagcctttatttatttatatatttattatataaaagctttatttgttctaggttgttcatgaaatatttttttggttttatctccgttgtaagaaaatcatgtgctttgtgtcgccactcactattgcagctttttcatgcattggtcagattgacggttgattgtatttttgttttttatggttttgtgttatgacttaagtcttcatctctttatctcttcatcaggtttgatggttacctaatatggtccatgggtacatgcatggttaaattaggtggccaactttgttgtgaacgatagaattttttttatattaagtaaactatttttatattatgaaataataataaaaaaaatattttatcattattaacaaaatcatattagttaatttgttaactctataataaaagaaatactgtaacattcacattacatggtaacatctttccaccctttcatttgttttttgtttgatgactttttttcttgtttaaatttatttcccttcttttaaatttggaatacattatcatcatatataaactaaaatactaaaaacaggattacacaaatgataaataataacacaaatatttataaatctagctgcaatatatttaaactagctatatcgatattgtaaaataaaactagctgcattgatactgataaaaaaatatcatgtgctttctggactgatgatgcagtatacttttgacattgcctttattttatttttcagaaaagctttcttagttctgggttcttcattatttgtttcccatctccattgtgaattgaatcatttgcttcgtgtcacaaatacaatttagntaggtacatgcattggtcagattcacggtttattatgtcatgacttaagttcatggtagtacattacctgccacgcatgcattatattggttagatttgataggcaaatttggttgtcaacaatataaatataaataatgtttttatattacgaaataacagtgatcaaaacaaacagttttatctttattaacaagattttgtttttgtttgatgacgttttttaatgtttacgctttcccccttcttttgaatttagaacactttatcatcataaaatcaaatactaaaaaaattacatatttcataaataataacacaaatatttttaaaaaatctgaaataataatgaacaatattacatattatcacgaaaattcattaataaaaatattatataaataaaatgtaatagtagttatatgtaggaaaaaagtactgcacgcataatatatacaaaaagattaaaatgaactattataaataataacactaaattaatggtgaatcatatcaaaataatgaaaaagtaaataaaatttgtaattaacttctatatgtattacacacacaaataataaataatagtaaaaaaaattatgataaatatttaccatctcataagatatttaaaataatgataaaaatatagattattttttatgcaactagctagccaaaaagagaacacgggtatatataaaaagagtacctttaaattctactgtacttcctttattcctgacgtttttatatcaagtggacatacgtgaagattttaattatcagtctaaatatttcattagcacttaatacttttctgttttattcctatcctataagtagtcccgattctcccaacattgcttattcacacaactaactaagaaagtcttccatagccccccaagcggccgcaccatgtccgaaaccgaccatctgctggccgccgagcccgtggctgagtacccccagtacacgccttggcccaactcccgaaaatcagtggacacggagttttccgcaacctcgtggatttacgacttggttctgtggattttcacggcttgctttgacatttttttcagagaaatccggccacgtggtgccttccgaatccccagaaagggccccgtgctgttcgtggctgccccccacgcaaaccagtttgtggaccccgtcatcctcatgaaccaggtcaaacaggaggccggacgacgaatctccttccttgtggccgagaagtccatgcgacgagctgcagtcggacgaatggcccgaagcatgaactcaattcctgtcgtgcgagctcaggacaatgcaaaaaagggagagggaaagatttacgtcgacgcagaggaccccacaaagatccacggaatcggcacccagttcacgaagcagtgcgaggtgcgaggcctcgtggtctgctcgtcctctgtcggctcaattgacgtggctgagattgtgtccgacactctgctcattgcaagaaaggaattcaagggccccaaagccaaggaggctctcaaggaatccaacggaggaatcacatacaagtacgccgactacgtcaaccaggccacagtctaccgatccgtattcgacaaattgcaccatggaggctgtgtgggtatcttcccagagggaggatctcatgaccgaaccgaactgctgccccttaaggccggtgttgctatcatggctctgggggctctcgcagaggacccctcttgtggtgtgcgaatcgtcccctgtggtctcaactacttccacgcccacaagttccgatctcgggccgtggtggagtttggctctcctattgccattcctccggatctcgtggagaagtacaaggcaggaggagaggccaagcgggaggctgtcaagaccgttctagacattactgccgctggtctcaagtctgtgactgttcaggtgcaggatttcgacaccctgatgctgatccaggccattcgacgactctaccgacctcccggaaagaagattcctctgcccatggttgtagagctcaaccgtcgacttgtatacgcctacaaccactacaaggacgatccccgtatcgaggagatgaagcaggagattcgaaagtacaacaagttcctgcaggccatgggtctcaaggaccatcaggtagagaaggcccgaatctccaagattgagattctgggccggcttctgtaccggtccatcaagcttgtgttcttgtccattggctgtctccccggtctgcttttgttttctcccatcttcatcatttctaagtccatttccaaaaccaaggccaaggaggctctcaaggcctccagtgtcaaaatcaaggctaacgatgtggttgccacttggaaggtgctggttgcaatgggtctgaccccagttctttacattctctattcactggttggatctgtggtgattcgaaagctcgatctcatctcctggttccccacaattcttcttcccggcctcgttttaagcatcatcatcacaacctcatacgccgccctggctatgggagaggccggtatggacattttcaagtctcttcgaccacttgcattggctctcaacccttccaccaaaaactctctgctcaagctgcaaaatgaacgaaagcgacttgtgctcaagtcttccgagctcgttacctctttgggccctgagctgttccccgacttccccgagaactccattctgcagggaagcgataagtttgaggacgaggagaactacgaaaacgagaagcgatcgcattccagatccacttctgccacttctctatctgccatgagcgagggagacggtgatgagcttgttcgggaggtccgaaagggtgctagctacttccctgtgagtaccatttctgaggacgaagaccaagccatctcgcgagtgggctctgaggcatctcttgctgacattcctctgtttggtatgtcccgatcacaatctggagcttctctttcggaagcctccacacacggctcttctactggagctgatgccgaggaggctaagacggaggtgactcgcagaattgcattggcgatggaggaaaaacgacgagagcaggatgaggaataagc

SEQ ID NO: 128 - DNA, 837 bp, Yarrowia lipolytica
atgttgtcttccagctccaccctcaagcagtaccatgtgatcgagtggatcaccgccttcacgctcatcttcttgtggtacgtgtcagagagcgcggcgcccttcacgcgtgaattcatcatcagcgaccccacaatcaaccactcacatgtcacagttgagcgtgtcagctcagaggcttgtattctctacaccatcatcattcccttctttgtgctcattggactgtctgctatcatggctccccgaccgcaggaccgactcaagttcatgtccatcactctgtccacctttctggttgccgccttcttcaacggcttcatcaccaactttctcaagatttacatgggccgacaccgacccgacttcattgcccgatgtgagccctccaagcgagctcccattgataagtatgtgacaatcgaggtttgcactggagatatggacaccattttggagggcatgaaatccactccttctggccactcctccacagcttttgtgggaatgacgttcttctgcttgtgggtatacggacagatcaacgcctacaagacttatgggagcaaggcctccaagctgctgcttgctttcttcccccttcttctggccatctatattgcactgagtagaactgaggactaccgacaccactttgtcgacattgttctcggatctttgctgggtatgaccatcgcctactacttctaccgacgcgagttcccccgaaccacctccaagacctctcatatcccctactgtctcggcagcgagggagctgacgacgaccatcattacgaccgagttgacgatgttcagctcgagaaccaggtttaa

SEQ ID NO: 129 - protein, 278 aa, Yarrowia lipolytica
MLSSSSTLKQYHVIEWITAFTLIFLWYVSESAAPFTREFIISDPTINHSHVTVERVSSEACILYTIIIPFFVLIGLSAIMAPRPQDRLKFMSITLSTFLVAAFFNGFITNFLKIYMGRHRPDFIARCEPSKRAPIDKYVTIEVCTGDMDTILEGMKSTPSGHSSTAFVGMTFFCLWVYGQINAYKTYGSKASKLLLAFFPLLLAIYIALSRTEDYRHHFVDIVLGSLLGMTIAYYFYRREFPRTTSKTSHIPYCLGSEGADDDHHYDRVDDVQLENQV

SEQ ID NO: 130 - DNA, 33 bp, Artificial Sequence
  primer YlPAP1-5
agcggccgcaccatgttgtcttccagctccacc

SEQ ID NO: 131 - DNA, 30 bp, Artificial Sequence
  primer YlPAP1-3
agcggccgcttaaacctggttctcgagctg

SEQ ID NO: 132 - DNA, 3875 bp, Artificial Sequence
  plasmid pHD33
aatcactagtgaattcgcggccgcctgcaggtcgaccatatgggagagctcccaacgcgttggatgcatagcttgagtattctatagtgtcacctaaatagcttggcgtaatcatggtcatagctgtttcctgtgtgaaattgttatccgctcacaattccacacaacatacgagccggaagcataaagtgtaaagcctggggtgcctaatgagtgagctaactcacattaattgcgttgcgctcactgcccgctttccagtcgggaaacctgtcgtgccagctgcattaatgaatcggccaacgcgcggggagaggcggtttgcgtattgggcgctcttccgcttcctcgctcactgactcgctgcgctcggtcgttcggctgcggcgagcggtatcagctcactcaaaggcggtaatacggttatccacagaatcaggggataacgcaggaaagaacatgtgagcaaaaggccagcaaaaggccaggaaccgtaaaaaggccgcgttgctggcgtttttccataggctccgcccccctgacgagcatcacaaaaatcgacgctcaagtcagaggtggcgaaacccgacaggactataaagataccaggcgtttccccctggaagctccctcgtgcgctctcctgttccgaccctgccgcttaccggatacctgtccgcctttctcccttcgggaagcgtggcgctttctcatagctcacgctgtaggtatctcagttcggtgtaggtcgttcgctccaagctgggctgtgtgcacgaaccccccgttcagcccgaccgctgcgccttatccggtaactatcgtcttgagtccaacccggtaagacacgacttatcgccactggcagcagccactggtaacaggattagcagagcgaggtatgtaggcggtgctacagagttcttgaagtggtggcctaactacggctacactagaagaacagtatttggtatctgcgctctgctgaagccagttaccttcggaaaaagagttggtagctcttgatccggcaaacaaaccaccgctggtagcggtggtttttttgtttgcaagcagcagattacgcgcagaaaaaaaggatctcaagaagatcctttgatcttttctacggggtctgacgctcagtggaacgaaaactcacgttaagggattttggtcatgagattatcaaaaaggatcttcacctagatccttttaaattaaaaatgaagttttaaatcaatctaaagtatatatgagtaaacttggtctgacagttaccaatgcttaatcagtgaggcacctatctcagcgatctgtctatttcgttcatccatagttgcctgactccccgtcgtgtagataactacgatacgggagggcttaccatctggccccagtgctgcaatgataccgcgagacccacgctcaccggctccagatttatcagcaataaaccagccagccggaagggccgagcgcagaagtggtcctgcaactttatccgcctccatccagtctattaattgttgccgggaagctagagtaagtagttcgccagttaatagtttgcgcaacgttgttgccattgctacaggcatcgtggtgtcacgctcgtcgtttggtatggcttcattcagctccggttcccaacgatcaaggcgagttacatgatcccccatgttgtgcaaaaaagcggttagctccttcggtcctccgatcgttgtcagaagtaagttggccgcagtgttatcactcatggttatggcagcactgcataattctcttactgtcatgccatccgtaagatgcttttctgtgactggtgagtactcaaccaagtcattctgagaatagtgtatgcggcgaccgagttgctcttgcccggcgtcaatacgggataataccgcgccacatagcagaactttaaaagtgctcatcattggaaaacgttcttcggggcgaaaactctcaaggatcttaccgctgttgagatccagttcgatgtaacccactcgtgcacccaactgatcttcagcatcttttactttcaccagcgtttctgggtgagcaaaaacaggaaggcaaaatgccgcaaaaaagggaataagggcgacacggaaatgttgaatactcatactcttcctttttcaatattattgaagcatttatcagggttattgtctcatgagcggatacatatttgaatgtatttagaaaaataaacaaataggggttccgcgcacatttccccgaaaagtgccacctgatgcggtgtgaaataccgcacagatgcgtaaggagaaaataccgcatcaggaaattgtaagcgttaatattttgttaaaattcgcgttaaatttttgttaaatcagctcattttttaaccaataggccgaaatcggcaaaatcccttataaatcaaaagaatagaccgagatagggttgagtgttgttccagtttggaacaagagtccactattaaagaacgtggactccaacgtcaaagggcgaaaaaccgtctatcagggcgatggcccactacgtgaaccatcaccctaatcaagttttttggggtcgaggtgccgtaaagcactaaatcggaaccctaaagggagcccccgatttagagcttgacggggaaagccggcgaacgtggcgagaaaggaagggaagaaagcgaaaggagcgggcgctagggcgctggcaagtgtagcggtcacgctgcgcgtaaccaccacacccgccgcgcttaatgcgccgctacagggcgcgtccattcgccattcaggctgcgcaactgttgggaagggcgatcggtgcgggcctcttcgctattacgccagctggcgaaagggggatgtgctgcaaggcgattaagttgggtaacgccagggttttcccagtcacgacgttgtaaaacgacggccagtgaattgtaatacgactcactatagggcgaattgggcccgacgtcgcatgctcccggccgccatggcggccgcgggaattcgattagcggccgcttaaacctggttctcgagctgaacatcgtcaactcggtcgtaatgatggtcgtcgtcagctccctcgctgccgagacagtaggggatatgagaggtcttggaggtggttcgggggaactcgcgtcggtagaagtagtaggcgatggtcatacccagcaaagatccgagaacaatgtcgacaaagtggtgtcggtagtcctcagttctactcagtgcaatatagatggccagaagaagggggaagaaagcaagcagcagcttggaggccttgctcccataagtcttgtaggcgttgatctgtccgtatacccacaagcagaagaacgtcattcccacaaaagctgtggaggagtggccagaaggagtggatttcatgccctccaaaatggtgtccatatctccagtgcaaacctcgattgtcacatacttatcaatgggagctcgcttggagggctcacatcgggcaatgaagtcgggtcggtgtcggcccatgtaaatcttgagaaagttggtgatgaagccgttgaagaaggcggcaaccagaaaggtggacagagtgatggacatgaacttgagtcggtcctgcggtcggggagccatgatagcagacagtccaatgagcacaaagaagggaatgatgatggtgtagagaatacaagcctctgagctgacacgctcaactgtgacatgtgagtggttgattgtggggtcgctgatgatgaattcacgcgtgaagggcgccgcgctctctgacacgtaccacaagaagatgagcgtgaaggcggtgatccactcgatcacatggtactgcttgagggtggagctggaagacaacatggtgcggccgct

SEQ ID NO: 133 - DNA, 6100 bp, Artificial Sequence
  plasmid pKR1347
  misc_feature (4340)..(4340): n is a, c, g, or t
ggccgcgacacaagtgtgagagtactaaataaatgctttggttgtacgaaatcattacactaaataaaataatcaaagcttatatatgccttccgctaaggccgaatgcaaagaaattggttctttctcgttatcttttgccacttttactagtacgtattaattactacttaatcatctttgtttacggctcattatatccggtctagaggatccaaggccgcgaagttaaaagcaatgttgtcacttgtcgtactaacacatgatgtgatagtttatgctagctagctataacataagctgtctctgagtgtgttgtatattaataaagatcatcactggtgaatggtgatcgtgtacgtaccctacttagtaggcaatggaagcacttagagtgtgctttgtgcatggccttgcctctgttttgagacttttgtaatgttttcgagtttaaatctttgcctttgcgtacgtgggcggatcccccgggctgcaggaattcactggccgtcgttttacaacgtcgtgactgggaaaaccctggcgttacccaacttaatcgccttgcagcacatccccctttcgccagctggcgtaatagcgaagaggcccgcaccgatcgcccttcccaacagttgcgcagcctgaatggcgaatggcgcctgatgcggtattttctccttacgcatctgtgcggtatttcacaccgcatatggtgcactctcagtacaatctgctctgatgccgcatagttaagccagccccgacacccgccaacacccgctgacgcgccctgacgggcttgtctgctcccggcatccgcttacagacaagctgtgaccgtctccgggagctgcatgtgtcagaggttttcaccgtcatcaccgaaacgcgcgagacgaaagggcctcgtgatacgcctatttttataggttaatgtcatgataataatggtttcttagacgtcaggtggcacttttcggggaaatgtgcgcggaacccctatttgtttatttttctaaatacattcaaatatgtatccgctcatgagacaataaccctgataaatgcttcaataatattgaaaaaggaagagtatgagtattcaacatttccgtgtcgcccttattcccttttttgcggcattttgccttcctgtttttgctcacccagaaacgctggtgaaagtaaaagatgctgaagatcagttgggtgcacgagtgggttacatcgaactggatctcaacagcggtaagatccttgagagttttcgccccgaagaacgttttccaatgatgagcacttttaaagttctgctatgtggcgcggtattatcccgtattgacgccgggcaagagcaactcggtcgccgcatacactattctcagaatgacttggttgagtactcaccagtcacagaaaagcatcttacggatggcatgacagtaagagaattatgcagtgctgccataaccatgagtgataacactgcggccaacttacttctgacaacgatcggaggaccgaaggagctaaccgcttttttgcacaacatgggggatcatgtaactcgccttgatcgttgggaaccggagctgaatgaagccataccaaacgacgagcgtgacaccacgatgcctgtagcaatggcaacaacgttgcgcaaactattaactggcgaactacttactctagcttcccggcaacaattaatagactggatggaggcggataaagttgcaggaccacttctgcgctcggcccttccggctggctggtttattgctgataaatctggagccggtgagcgtgggtctcgcggtatcattgcagcactggggccagatggtaagccctcccgtatcgtagttatctacacgacggggagtcaggcaactatggatgaacgaaatagacagatcgctgagataggtgcctcactgattaagcattggtaactgtcagaccaagtttactcatatatactttagattgatttaaaacttcatttttaatttaaaaggatctaggtgaagatcctttttgataatctcatgaccaaaatcccttaacgtgagttttcgttccactgagcgtcagaccccgtagaaaagatcaaaggatcttcttgagatcctttttttctgcgcgtaatctgctgcttgcaaacaaaaaaaccaccgctaccagcggtggtttgtttgccggatcaagagctaccaactctttttccgaaggtaactggcttcagcagagcgcagataccaaatactgtccttctagtgtagccgtagttaggccaccacttcaagaactctgtagcaccgcctacatacctcgctctgctaatcctgttaccagtggctgctgccagtggcgataagtcgtgtcttaccgggttggactcaagacgatagttaccggataaggcgcagcggtcgggctgaacggggggttcgtgcacacagcccagcttggagcgaacgacctacaccgaactgagatacctacagcgtgagctatgagaaagcgccacgcttcccgaagggagaaaggcggacaggtatccggtaagcggcagggtcggaacaggagagcgcacgagggagcttccagggggaaacgcctggtatctttatagtcctgtcgggtttcgccacctctgacttgagcgtcgatttttgtgatgctcgtcaggggggcggagcctatggaaaaacgccagcaacgcggcctttttacggttcctggccttttgctggccttttgctcacatgttctttcctgcgttatcccctgattctgtggataaccgtattaccgcctttgagtgagctgataccgctcgccgcagccgaacgaccgagcgcagcgagtcagtgagcgaggaagcggaagagcgcccaatacgcaaaccgcctctccccgcgcgttggccgattcattaatgcagctggcacgacaggtttcccgactggaaagcgggcagtgagcgcaacgcaattaatgtgagttagctcactcattaggcaccccaggctttacactttatgcttccggctcgtatgttgtgtggaattgtgagcggataacaatttcacacaggaaacagctatgaccatgattacgccaagcttgcatgcctgcaggtcgactcgacgtacgtcctcgaagagaagggttaataacacattttttaacatttttaacacaaattttagttatttaaaaatttattaaaaaatttaaaataagaagaggaactctttaaataaatctaacttacaaaatttatgatttttaataagttttcaccaataaaaaatgtcataaaaatatgttaaaaagtatattatcaatattctctttatgataaataaaaagaaaaaaaaaataaaagttaagtgaaaatgagattgaagtgactttaggtgtgtataaatatatcaaccccgccaacaatttatttaatccaaatatattgaagtatattattccatagcctttatttatttatatatttattatataaaagctttatttgttctaggttgttcatgaaatatttttttggttttatctccgttgtaagaaaatcatgtgctttgtgtcgccactcactattgcagctttttcatgcattggtcagattgacggttgattgtatttttgttttttatggttttgtgttatgacttaagtcttcatctctttatctcttcatcaggtttgatggttacctaatatggtccatgggtacatgcatggttaaattaggtggccaactttgttgtgaacgatagaattttttttatattaagtaaactatttttatattatgaaataataataaaaaaaatattttatcattattaacaaaatcatattagttaatttgttaactctataataaaagaaatactgtaacattcacattacatggtaacatctttccaccctttcatttgttttttgtttgatgactttttttcttgtttaaatttatttcccttcttttaaatttggaatacattatcatcatatataaactaaaatactaaaaacaggattacacaaatgataaataataacacaaatatttataaatctagctgcaatatatttaaactagctatatcgatattgtaaaataaaactagctgcattgatactgataaaaaaatatcatgtgctttctggactgatgatgcagtatacttttgacattgcctttattttatttttcagaaaagctttcttagttctgggttcttcattatttgtttcccatctccattgtgaattgaatcatttgcttcgtgtcacaaatacaatttagntaggtacatgcattggtcagattcacggtttattatgtcatgacttaagttcatggtagtacattacctgccacgcatgcattatattggttagatttgataggcaaatttggttgtcaacaatataaatataaataatgtttttatattacgaaataacagtgatcaaaacaaacagttttatctttattaacaagattttgtttttgtttgatgacgttttttaatgtttacgctttcccccttcttttgaatttagaacactttatcatcataaaatcaaatactaaaaaaattacatatttcataaataataacacaaatatttttaaaaaatctgaaataataatgaacaatattacatattatcacgaaaattcattaataaaaatattatataaataaaatgtaatagtagttatatgtaggaaaaaagtactgcacgcataatatatacaaaaagattaaaatgaactattataaataataacactaaattaatggtgaatcatatcaaaataatgaaaaagtaaataaaatttgtaattaacttctatatgtattacacacacaaataataaataatagtaaaaaaaattatgataaatatttaccatctcataagatatttaaaataatgataaaaatatagattattttttatgcaactagctagccaaaaagagaacacgggtatatataaaaagagtacctttaaattctactgtacttcctttattcctgacgtttttatatcaagtggacatacgtgaagattttaattatcagtctaaatatttcattagcacttaatacttttctgttttattcctatcctataagtagtcccgattctcccaacattgcttattcacacaactaactaagaaagtcttccatagccccccaagcggccgcaccatgttgtcttccagctccaccctcaagcagtaccatgtgatcgagtggatcaccgccttcacgctcatcttcttgtggtacgtgtcagagagcgcggcgcccttcacgcgtgaattcatcatcagcgaccccacaatcaaccactcacatgtcacagttgagcgtgtcagctcagaggcttgtattctctacaccatcatcattcccttctttgtgctcattggactgtctgctatcatggctccccgaccgcaggaccgactcaagttcatgtccatcactctgtccacctttctggttgccgccttcttcaacggcttcatcaccaactttctcaagatttacatgggccgacaccgacccgacttcattgcccgatgtgagccctccaagcgagctcccattgataagtatgtgacaatcgaggtttgcactggagatatggacaccattttggagggcatgaaatccactccttctggccactcctccacagcttttgtgggaatgacgttcttctgcttgtgggtatacggacagatcaacgcctacaagacttatgggagcaaggcctccaagctgctgcttgctttcttcccccttcttctggccatctatattgcactgagtagaactgaggactaccgacaccactttgtcgacattgttctcggatctttgctgggtatgaccatcgcctactacttctaccgacgcgagttcccccgaaccacctccaagacctctcatatcccctactgtctcggcagcgagggagctgacgacgaccatcattacgaccgagttgacgatgttcagctcgagaaccaggtttaagc

SEQ ID NO: 134 - DNA, 1602 bp, Yarrowia lipolytica
atgacgtattcaacgcagtcgtcatcgactctagtggctatacgcagagacgagtgtttcttccccatcagcagccattctatctccctttcttcggtgctgtcttacttgattgactggatcttctacatcagtctcaccacgctagctcttgtctacgccaagattgtgtccccgcttttcgccgaattctacctctacaacacctcgctatggtacagccatattccgaccgacctcacaattgtgcccacgtttcttctcatcatctactcgattctgatccccattggccaatttgcactcaccattggattcaccacctctcatagatggcacagacgactctgggacctgcacgctatcctcctgaccctgatggcggcccacgccctgcaaactgtgattgtatcgctcctaaaaaatctggtgggagccccccggccagatatgctcgcaagatgtagacccatgtcctggatgcgtccgtcattcggaactctttccaacgtcggcatttgcacacaaacagacattggacatcttgaagaagggtttcggtcgtttccttccgcccattccgccacggcattcacatcggctatggttcaagtccttttttggatcgcccgaacccggatgctggactgctctgggtggtcttggaagctgcttctcagcctggttccacttctgtcggcttctgcagtcgccttctcacgcatctcagacaatagacaccacgtcttcgacgtgatcatcggaatgctgattggtctgattgcaggctatctcgcctttatccactactttccgttccccacctttgccaacgtctgtaccgggggacgggcatactcgcctcgatgtggtattctggggagcgtgggctgctggtcgttgggcgacgagacgggctgtttgcgaaccaagctgttcaaaacccccaaatgctctgtcaaggcaaccttcaccatgggatgtggaacagagctctgtgtctgcaagaagccctcatgtggagcgtgctctgtgggaggggaaggggccaaatgctctctacggtgctcaattagaaactgcacgggaaatgcatgcacctcgcggcctgtaagcaggagatctaccagacgaacccctagtcggcggtcccgaagatctcaccagacctatccgggaaggtcttctgaaacggcctgtctgccctcttgttctcctacatgtacaggcaactgtcacgacaccacttgtagtagttgcgacagctcagcaacagccaccgagccgtcgcacacaagatctgctcaccgatgcaccaacccggtgtgcaccattgcgggctgtataggagcttgtttgcgacgggtcaccagccgaccccgatgtacgactgtgggttgtactgtggccaattgcattggtatctcttgcttggtgggacgagtgcgcacttgtcgtattccctggtgtcgtaacgagcgatgcatgaggcttgctcgagagcattgttttgatggggaagcttctaccattgatgttggagggggaagatccagagcttctaggcaccgtagggtgagtagacatgccattactccctaa

SEQ ID NO: 135 - protein, 533 aa, Yarrowia lipolytica
MTYSTQSSSTLVAIRRDECFFPISSHSISLSSVLSYLIDWIFYISLTTLALVYAKIVSPLFAEFYLYNTSLWYSHIPTDLTIVPTFLLIIYSILIPIGQFALTIGFTTSHRWHRRLWDLHAILLTLMAAHALQTVIVSLLKNLVGAPRPDMLARCRPMSWMRPSFGTLSNVGICTQTDIGHLEEGFRSFPSAHSATAFTSAMVQVLFWIARTRMLDCSGWSWKLLLSLVPLLSASAVAFSRISDNRHHVFDVIIGMLIGLIAGYLAFIHYFPFPTFANVCTGGRAYSPRCGILGSVGCWSLGDETGCLRTKLFKTPKCSVKATFTMGCGTELCVCKKPSCGACSVGGEGAKCSLRCSIRNCTGNACTSRPVSRRSTRRTPSRRSRRSHQTYPGRSSETACLPSCSPTCTGNCHDTTCSSCDSSATATEPSHTRSAHRCTNPVCTIAGCIGACLRRVTSRPRCTTVGCTVANCIGISCLVGRVRTCRIPWCRNERCMRLAREHCFDGEASTIDVGGGRSRASRHRRVSRHAITP

SEQ ID NO: 136 - DNA, 33 bp, Artificial Sequence
  primer YlPAP3-5
agcggccgcaccatgacgtattcaacgcagtcg

SEQ ID NO: 137 - DNA, 29 bp, Artificial Sequence
  primer YlPAP3-3
agcggccgcttagggagtaatggcatgtc

SEQ ID NO: 138 - DNA, 4640 bp, Artificial Sequence
  plasmid pHD34
aatcactagtgaattcgcggccgcctgcaggtcgaccatatgggagagctcccaacgcgttggatgcatagcttgagtattctatagtgtcacctaaatagcttggcgtaatcatggtcatagctgtttcctgtgtgaaattgttatccgctcacaattccacacaacatacgagccggaagcataaagtgtaaagcctggggtgcctaatgagtgagctaactcacattaattgcgttgcgctcactgcccgctttccagtcgggaaacctgtcgtgccagctgcattaatgaatcggccaacgcgcggggagaggcggtttgcgtattgggcgctcttccgcttcctcgctcactgactcgctgcgctcggtcgttcggctgcggcgagcggtatcagctcactcaaaggcggtaatacggttatccacagaatcaggggataacgcaggaaagaacatgtgagcaaaaggccagcaaaaggccaggaaccgtaaaaaggccgcgttgctggcgtttttccataggctccgcccccctgacgagcatcacaaaaatcgacgctcaagtcagaggtggcgaaacccgacaggactataaagataccaggcgtttccccctggaagctccctcgtgcgctctcctgttccgaccctgccgcttaccggatacctgtccgcctttctcccttcgggaagcgtggcgctttctcatagctcacgctgtaggtatctcagttcggtgtaggtcgttcgctccaagctgggctgtgtgcacgaaccccccgttcagcccgaccgctgcgccttatccggtaactatcgtcttgagtccaacccggtaagacacgacttatcgccactggcagcagccactggtaacaggattagcagagcgaggtatgtaggcggtgctacagagttcttgaagtggtggcctaactacggctacactagaagaacagtatttggtatctgcgctctgctgaagccagttaccttcggaaaaagagttggtagctcttgatccggcaaacaaaccaccgctggtagcggtggtttttttgtttgcaagcagcagattacgcgcagaaaaaaaggatctcaagaagatcctttgatcttttctacggggtctgacgctcagtggaacgaaaactcacgttaagggattttggtcatgagattatcaaaaaggatcttcacctagatccttttaaattaaaaatgaagttttaaatcaatctaaagtatatatgagtaaacttggtctgacagttaccaatgcttaatcagtgaggcacctatctcagcgatctgtctatttcgttcatccatagttgcctgactccccgtcgtgtagataactacgatacgggagggcttaccatctggccccagtgctgcaatgataccgcgagacccacgctcaccggctccagatttatcagcaataaaccagccagccggaagggccgagcgcagaagtggtcctgcaactttatccgcctccatccagtctattaattgttgccgggaagctagagtaagtagttcgccagttaatagtttgcgcaacgttgttgccattgctacaggcatcgtggtgtcacgctcgtcgtttggtatggcttcattcagctccggttcccaacgatcaaggcgagttacatgatcccccatgttgtgcaaaaaagcggttagctccttcggtcctccgatcgttgtcagaagtaagttggccgcagtgttatcactcatggttatggcagcactgcataattctcttactgtcatgccatccgtaagatgcttttctgtgactggtgagtactcaaccaagtcattctgagaatagtgtatgcggcgaccgagttgctcttgcccggcgtcaatacgggataataccgcgccacatagcagaactttaaaagtgctcatcattggaaaacgttcttcggggcgaaaactctcaaggatcttaccgctgttgagatccagttcgatgtaacccactcgtgcacccaactgatcttcagcatcttttactttcaccagcgtttctgggtgagcaaaaacaggaaggcaaaatgccgcaaaaaagggaataagggcgacacggaaatgttgaatactcatactcttcctttttcaatattattgaagcatttatcagggttattgtctcatgagcggatacatatttgaatgtatttagaaaaataaacaaataggggttccgcgcacatttccccgaaaagtgccacctgatgcggtgtgaaataccgcacagatgcgtaaggagaaaataccgcatcaggaaattgtaagcgttaatattttgttaaaattcgcgttaaatttttgttaaatcagctcattttttaaccaataggccgaaatcggcaaaatcccttataaatcaaaagaatagaccgagatagggttgagtgttgttccagtttggaacaagagtccactattaaagaacgtggactccaacgtcaaagggcgaaaaaccgtctatcagggcgatggcccactacgtgaaccatcaccctaatcaagttttttggggtcgaggtgccgtaaagcactaaatcggaaccctaaagggagcccccgatttagagcttgacggggaaagccggcgaacgtggcgagaaaggaagggaagaaagcgaaaggagcgggcgctagggcgctggcaagtgtagcggtcacgctgcgcgtaaccaccacacccgccgcgcttaatgcgccgctacagggcgcgtccattcgccattcaggctgcgcaactgttgggaagggcgatcggtgcgggcctcttcgctattacgccagctggcgaaagggggatgtgctgcaaggcgattaagttgggtaacgccagggttttcccagtcacgacgttgtaaaacgacggccagtgaattgtaatacgactcactatagggcgaattgggcccgacgtcgcatgctcccggccgccatggcggccgcgggaattcgattagcggccgcaccatgacgtattcaacgcagtcgtcatcgactctagtggctatacgcagagacgagtgtttcttccccatcagcagccattctatctccctttcttcggtgctgtcttacttgattgactggatcttctacatcagtctcaccacgctagctcttgtctacgccaagattgtgtccccgcttttcgccgaattctacctctacaacacctcgctatggtacagccatattccgaccgacctcacaattgtgcccacgtttcttctcatcatctactcgattctgatccccattggccaatttgcactcaccattggattcaccacctctcatagatggcacagacgactctgggacctgcacgctatcctcctgaccctgatggcggcccacgccctgcaaactgtgattgtatcgctcctaaaaaatctggtgggagccccccggccagatatgctcgcaagatgtagacccatgtcctggatgcgtccgtcattcggaactctttccaacgtcggcatttgcacacaaacagacattggacatcttgaagaagggtttcggtcgtttccttccgcccattccgccacggcattcacatcggctatggttcaagtccttttttggatcgcccgaacccggatgctggactgctctgggtggtcttggaagctgcttctcagcctggttccacttctgtcggcttctgcagtcgccttctcacgcatctcagacaatagacaccacgtcttcgacgtgatcatcggaatgctgattggtctgattgcaggctatctcgcctttatccactactttccgttccccacctttgccaacgtctgtaccgggggacgggcatactcgcctcgatgtggtattctggggagcgtgggctgctggtcgttgggcgacgagacgggctgtttgcgaaccaagctgttcaaaacccccaaatgctctgtcaaggcaaccttcaccatgggatgtggaacagagctctgtgtctgcaagaagccctcatgtggagcgtgctctgtgggaggggaaggggccaaatgctctctacggtgctcaattagaaactgcacgggaaatgcatgcacctcgcggcctgtaagcaggagatctaccagacgaacccctagtcggcggtcccgaagatctcaccagacctatccgggaaggtcttctgaaacggcctgtctgccctcttgttctcctacatgtacaggcaactgtcacgacaccacttgtagtagttgcgacagctcagcaacagccaccgagccgtcgcacacaagatctgctcaccgatgcaccaacccggtgtgcaccattgcgggctgtataggagcttgtttgcgacgggtcaccagccgaccccgatgtacgactgtgggttgtactgtggccaattgcattggtatctcttgcttggtgggacgagtgcgcacttgtcgtattccctggtgtcgtaacgagcgatgcatgaggcttgctcgagagcattgttttgatggggaagcttctaccattgatgttggagggggaagatccagagcttctaggcaccgtagggtgagtagacatgccattactccctaagcggccgct

SEQ ID NO: 139 - DNA, 6865 bp, Artificial Sequence
  plasmid pKR1348-2
  misc_feature (3872)..(3872): n is a, c, g, or t
gtacgtgggcggatcccccgggctgcaggaattcactggccgtcgttttacaacgtcgtgactgggaaaaccctggcgttacccaacttaatcgccttgcagcacatccccctttcgccagctggcgtaatagcgaagaggcccgcaccgatcgcccttcccaacagttgcgcagcctgaatggcgaatggcgcctgatgcggtattttctccttacgcatctgtgcggtatttcacaccgcatatggtgcactctcagtacaatctgctctgatgccgcatagttaagccagccccgacacccgccaacacccgctgacgcgccctgacgggcttgtctgctcccggcatccgcttacagacaagctgtgaccgtctccgggagctgcatgtgtcagaggttttcaccgtcatcaccgaaacgcgcgagacgaaagggcctcgtgatacgcctatttttataggttaatgtcatgataataatggtttcttagacgtcaggtggcacttttcggggaaatgtgcgcggaacccctatttgtttatttttctaaatacattcaaatatgtatccgctcatgagacaataaccctgataaatgcttcaataatattgaaaaaggaagagtatgagtattcaacatttccgtgtcgcccttattcccttttttgcggcattttgccttcctgtttttgctcacccagaaacgctggtgaaagtaaaagatgctgaagatcagttgggtgcacgagtgggttacatcgaactggatctcaacagcggtaagatccttgagagttttcgccccgaagaacgttttccaatgatgagcacttttaaagttctgctatgtggcgcggtattatcccgtattgacgccgggcaagagcaactcggtcgccgcatacactattctcagaatgacttggttgagtactcaccagtcacagaaaagcatcttacggatggcatgacagtaagagaattatgcagtgctgccataaccatgagtgataacactgcggccaacttacttctgacaacgatcggaggaccgaaggagctaaccgcttttttgcacaacatgggggatcatgtaactcgccttgatcgttgggaaccggagctgaatgaagccataccaaacgacgagcgtgacaccacgatgcctgtagcaatggcaacaacgttgcgcaaactattaactggcgaactacttactctagcttcccggcaacaattaatagactggatggaggcggataaagttgcaggaccacttctgcgctcggcccttccggctggctggtttattgctgataaatctggagccggtgagcgtgggtctcgcggtatcattgcagcactggggccagatggtaagccctcccgtatcgtagttatctacacgacggggagtcaggcaactatggatgaacgaaatagacagatcgctgagataggtgcctcactgattaagcattggtaactgtcagaccaagtttactcatatatactttagattgatttaaaacttcatttttaatttaaaaggatctaggtgaagatcctttttgataatctcatgaccaaaatcccttaacgtgagttttcgttccactgagcgtcagaccccgtagaaaagatcaaaggatcttcttgagatcctttttttctgcgcgtaatctgctgcttgcaaacaaaaaaaccaccgctaccagcggtggtttgtttgccggatcaagagctaccaactctttttccgaaggtaactggcttcagcagagcgcagataccaaatactgtccttctagtgtagccgtagttaggccaccacttcaagaactctgtagcaccgcctacatacctcgctctgctaatcctgttaccagtggctgctgccagtggcgataagtcgtgtcttaccgggttggactcaagacgatagttaccggataaggcgcagcggtcgggctgaacggggggttcgtgcacacagcccagcttggagcgaacgacctacaccgaactgagatacctacagcgtgagctatgagaaagcgccacgcttcccgaagggagaaaggcggacaggtatccggtaagcggcagggtcggaacaggagagcgcacgagggagcttccagggggaaacgcctggtatctttatagtcctgtcgggtttcgccacctctgacttgagcgtcgatttttgtgatgctcgtcaggggggcggagcctatggaaaaacgccagcaacgcggcctttttacggttcctggccttttgctggccttttgctcacatgttctttcctgcgttatcccctgattctgtggataaccgtattaccgcctttgagtgagctgataccgctcgccgcagccgaacgaccgagcgcagcgagtcagtgagcgaggaagcggaagagcgcccaatacgcaaaccgcctctccccgcgcgttggccgattcattaatgcagctggcacgacaggtttcccgactggaaagcgggcagtgagcgcaacgcaattaatgtgagttagctcactcattaggcaccccaggctttacactttatgcttccggctcgtatgttgtgtggaattgtgagcggataacaatttcacacaggaaacagctatgaccatgattacgccaagcttgcatgcctgcaggtcgactcgacgtacgtcctcgaagagaagggttaataacacattttttaacatttttaacacaaattttagttatttaaaaatttattaaaaaatttaaaataagaagaggaactctttaaataaatctaacttacaaaatttatgatttttaataagttttcaccaataaaaaatgtcataaaaatatgttaaaaagtatattatcaatattctctttatgataaataaaaagaaaaaaaaaataaaagttaagtgaaaatgagattgaagtgactttaggtgtgtataaatatatcaaccccgccaacaatttatttaatccaaatatattgaagtatattattccatagcctttatttatttatatatttattatataaaagctttatttgttctaggttgttcatgaaatatttttttggttttatctccgttgtaagaaaatcatgtgctttgtgtcgccactcactattgcagctttttcatgcattggtcagattgacggttgattgtatttttgttttttatggttttgtgttatgacttaagtcttcatctctttatctcttcatcaggtttgatggttacctaatatggtccatgggtacatgcatggttaaattaggtggccaactttgttgtgaacgatagaattttttttatattaagtaaactatttttatattatgaaataataataaaaaaaatattttatcattattaacaaaatcatattagttaatttgttaactctataataaaagaaatactgtaacattcacattacatggtaacatctttccaccctttcatttgttttttgtttgatgactttttttcttgtttaaatttatttcccttcttttaaatttggaatacattatcatcatatataaactaaaatactaaaaacaggattacacaaatgataaataataacacaaatatttataaatctagctgcaatatatttaaactagctatatcgatattgtaaaataaaactagctgcattgatactgataaaaaaatatcatgtgctttctggactgatgatgcagtatacttttgacattgcctttattttatttttcagaaaagctttcttagttctgggttcttcattatttgtttcccatctccattgtgaattgaatcatttgcttcgtgtcacaaatacaatttagntaggtacatgcattggtcagattcacggtttattatgtcatgacttaagttcatggtagtacattacctgccacgcatgcattatattggttagatttgataggcaaatttggttgtcaacaatataaatataaataatgtttttatattacgaaataacagtgatcaaaacaaacagttttatctttattaacaagattttgtttttgtttgatgacgttttttaatgtttacgctttcccccttcttttgaatttagaacactttatcatcataaaatcaaatactaaaaaaattacatatttcataaataataacacaaatatttttaaaaaatctgaaataataatgaacaatattacatattatcacgaaaattcattaataaaaatattatataaataaaatgtaatagtagttatatgtaggaaaaaagtactgcacgcataatatatacaaaaagattaaaatgaactattataaataataacactaaattaatggtgaatcatatcaaaataatgaaaaagtaaataaaatttgtaattaacttctatatgtattacacacacaaataataaataatagtaaaaaaaattatgataaatatttaccatctcataagatatttaaaataatgataaaaatatagattattttttatgcaactagctagccaaaaagagaacacgggtatatataaaaagagtacctttaaattctactgtacttcctttattcctgacgtttttatatcaagtggacatacgtgaagattttaattatcagtctaaatatttcattagcacttaatacttttctgttttattcctatcctataagtagtcccgattctcccaacattgcttattcacacaactaactaagaaagtcttccatagccccccaagcggccgcaccatgacgtattcaacgcagtcgtcatcgactctagtggctatacgcagagacgagtgtttcttccccatcagcagccattctatctccctttcttcggtgctgtcttacttgattgactggatcttctacatcagtctcaccacgctagctcttgtctacgccaagattgtgtccccgcttttcgccgaattctacctctacaacacctcgctatggtacagccatattccgaccgacctcacaattgtgcccacgtttcttctcatcatctactcgattctgatccccattggccaatttgcactcaccattggattcaccacctctcatagatggcacagacgactctgggacctgcacgctatcctcctgaccctgatggcggcccacgccctgcaaactgtgattgtatcgctcctaaaaaatctggtgggagccccccggccagatatgctcgcaagatgtagacccatgtcctggatgcgtccgtcattcggaactctttccaacgtcggcatttgcacacaaacagacattggacatcttgaagaagggtttcggtcgtttccttccgcccattccgccacggcattcacatcggctatggttcaagtccttttttggatcgcccgaacccggatgctggactgctctgggtggtcttggaagctgcttctcagcctggttccacttctgtcggcttctgcagtcgccttctcacgcatctcagacaatagacaccacgtcttcgacgtgatcatcggaatgctgattggtctgattgcaggctatctcgcctttatccactactttccgttccccacctttgccaacgtctgtaccgggggacgggcatactcgcctcgatgtggtattctggggagcgtgggctgctggtcgttgggcgacgagacgggctgtttgcgaaccaagctgttcaaaacccccaaatgctctgtcaaggcaaccttcaccatgggatgtggaacagagctctgtgtctgcaagaagccctcatgtggagcgtgctctgtgggaggggaaggggccaaatgctctctacggtgctcaattagaaactgcacgggaaatgcatgcacctcgcggcctgtaagcaggagatctaccagacgaacccctagtcggcggtcccgaagatctcaccagacctatccgggaaggtcttctgaaacggcctgtctgccctcttgttctcctacatgtacaggcaactgtcacgacaccacttgtagtagttgcgacagctcagcaacagccaccgagccgtcgcacacaagatctgctcaccgatgcaccaacccggtgtgcaccattgcgggctgtataggagcttgtttgcgacgggtcaccagccgaccccgatgtacgactgtgggttgtactgtggccaattgcattggtatctcttgcttggtgggacgagtgcgcacttgtcgtattccctggtgtcgtaacgagcgatgcatgaggcttgctcgagagcattgttttgatggggaagcttctaccattgatgttggagggggaagatccagagcttctaggcaccgtagggtgagtagacatgccattactccctaagcggccgcgacacaagtgtgagagtactaaataaatgctttggttgtacgaaatcattacactaaataaaataatcaaagcttatatatgccttccgctaaggccgaatgcaaagaaattggttctttctcgttatcttttgccacttttactagtacgtattaattactacttaatcatctttgtttacggctcattatatccggtctagaggatccaaggccgcgaagttaaaagcaatgttgtcacttgtcgtactaacacatgatgtgatagtttatgctagctagctataacataagctgtctctgagtgtgttgtatattaataaagatcatcactggtgaatggtgatcgtgtacgtaccctacttagtaggcaatggaagcacttagagtgtgctttgtgcatggccttgcctctgttttgagacttttgtaatgttttcgagtttaaatctttgcctttgc

SEQ ID NO: 140 - DNA, 2172 bp, Yarrowia lipolytica
atgaaggtgggcgatggaggagaagtcttctttgtgttcgagaccgacgcagacgtgcccgaagagctcctgacatcccccgtcatttctccctcttcgtcgccatcctggggccaggaggaaggcggggatggtgagccggactaccttgctctgaacgactctaaacagggtggcgacagcaagcacggcagatcgccctcggagggcccaccattcagatcaccttcggcggatcacttacatgagatgggcagcttcgatgatgagaatgaccctgaggtgaacagaagacaacgtgcgagcacggcagctccagagcctgttcctggttcgttgaaacacccagccactatctcggaaggcatctcttcggcctcgttttccaacagcgatactgatcgaacagacacttctggacccacagagacagaacccacagagctcacagagcctacagagcccacagagcccacagagcctctggatcttgagcagagtctccaccgggctgccacttctcccgccccttcgtccgaggagatttgggagaaggcccgtgcactgtccaagaaactcacatcagaaaacattcagagtaaaatctccgacaacggagacattattctggatatgactggttacaagtacgaccacgaggacgtgagtcgatcagaggagctggtcaagaaaatcctcgctgaggaactgggagaagacagagacctgtcccacatcctggttgaagacgaggagggtaaccttgtgattcagagcgctggagacagccaccatcacgagcatatgagctcgcccgagtctctggcccactcccctcagcccctcccttcttctaaccttccgtctcaggcctcggacaacaagcactacgccaagaccatccgtttgacgtctgaccagctcaagtctctggatctcaagcccggcaagaacgaggtcacctttgctgtcaataacggcaagacgtcgtgttcggcccagctgttctactggaagtacgacattcctgttgtcatttccgacattgatggcacgatcaccaagtccgatgctctgggccatctgctcaccatgatgggccgagactggacccacaccggcgtggccaagctcttttccgatatcagagccaacgggtataatatcatgtatctgacagcacgatcagtgggacaggcagatgcaaccagggcatatctaggcggtgttgaccagtttggcttcaagctgcctccaggacccgtcatcttgtcgcctgatagaaccctggcggctctcaagagagaggtgattcttaagaaacctgaggtattcaagatggcgtgtctgcgggacattaagtcgctgtttggcgagaccgaagacgccaccaatccattctacgctggatttggcaaccgaatcaccgacgcgttgtcgtatagatctgtcggtgtgccgtcgtctagaatcttcacaatcaactcgaacgccgaggtccatatggagctgcttgaactggctggctacaagtcctcgtatgtccacattgccgatcttgtcgaccactttttccctccggaaagcgagttcacgaccattcaggaggaaaaatacacggacgtcaactactggcgagatcccattattgacctgtctgatctgaccgacgacgagctgactgacgatgatgagctctccaagtcgcccaagtcgcccagatctcctagaagcccgcgggccggttcggcaggctccagcgcggctccctcaggctcgggcgccgaccctgccggaccctccgagccgaaggactccgcgaacccgtcgaagttcagctataagaaggctcctacgaactctcgattccagcccgtttcgtacgatcttgatcttgacgacggatacgagtacgacgatgacgatgactatgatgacgatgaggagtttgtggacgctgagagcgacgcgctggaggaggatgacgacgatgatgatgacgtcgacctagacaacgactctgaccactcccctgtcaagccgccctcgcagatgcagcgagtcatcaacaagactattgaggacaacaagggcctgcacatggatgaggatgacgttcaaaaagccatgaaggccctgaagatggaacgagcaagcatcaatcctgagtaa

SEQ ID NO: 141 - protein, 723 aa, Yarrowia lipolytica
MKVGDGGEVFFVFETDADVPEELLTSPVISPSSSPSWGQEEGGDGEPDYLALNDSKQGGDSKHGRSPSEGPPFRSPSADHLHEMGSFDDENDPEVNRRQRASTAAPEPVPGSLKHPATISEGISSASFSNSDTDRTDTSGPTETEPTELTEPTEPTEPTEPLDLEQSLHRAATSPAPSSEEIWEKARALSKKLTSENIQSKISDNGDIILDMTGYKYDHEDVSRSEELVKKILAEELGEDRDLSHILVEDEEGNLVIQSAGDSHHHEHMSSPESLAHSPQPLPSSNLPSQASDNKHYAKTIRLTSDQLKSLDLKPGKNEVTFAVNNGKTSCSAQLFYWKYDIPVVISDIDGTITKSDALGHLLTMMGRDWTHTGVAKLFSDIRANGYNIMYLTARSVGQADATRAYLGGVDQFGFKLPPGPVILSPDRTLAALKREVILKKPEVFKMACLRDIKSLFGETEDATNPFYAGFGNRITDALSYRSVGVPSSRIFTINSNAEVHMELLELAGYKSSYVHIADLVDHFFPPESEFTTIQEEKYTDVNYWRDPIIDLSDLTDDELTDDDELSKSPKSPRSPRSPRAGSAGSSAAPSGSGADPAGPSEPKDSANPSKFSYKKAPTNSRFQPVSYDLDLDDGYEYDDDDDYDDDEEFVDAESDALEEDDDDDDDVDLDNDSDHSPVKPPSQMQRVINKTIEDNKGLHMDEDDVQKAMKALKMERASINPE

SEQ ID NO: 142 - DNA, 34 bp, Artificial Sequence
  primer YlPAP2-5
agcggccgcaccatgaaggtgggcgatggaggag

SEQ ID NO: 143 - DNA, 30 bp, Artificial Sequence
  primer YlPAP2-3
agcggccgcttactcaggattgatgcttgc

SEQ ID NO: 144 - DNA, 5210 bp, Artificial Sequence
  plasmid pHD35
aatcactagtgaattcgcggccgcctgcaggtcgaccatatgggagagctcccaacgcgttggatgcatagcttgagtattctatagtgtcacctaaatagcttggcgtaatcatggtcatagctgtttcctgtgtgaaattgttatccgctcacaattccacacaacatacgagccggaagcataaagtgtaaagcctggggtgcctaatgagtgagctaactcacattaattgcgttgcgctcactgcccgctttccagtcgggaaacctgtcgtgccagctgcattaatgaatcggccaacgcgcggggagaggcggtttgcgtattgggcgctcttccgcttcctcgctcactgactcgctgcgctcggtcgttcggctgcggcgagcggtatcagctcactcaaaggcggtaatacggttatccacagaatcaggggataacgcaggaaagaacatgtgagcaaaaggccagcaaaaggccaggaaccgtaaaaaggccgcgttgctggcgtttttccataggctccgcccccctgacgagcatcacaaaaatcgacgctcaagtcagaggtggcgaaacccgacaggactataaagataccaggcgtttccccctggaagctccctcgtgcgctctcctgttccgaccctgccgcttaccggatacctgtccgcctttctcccttcgggaagcgtggcgctttctcatagctcacgctgtaggtatctcagttcggtgtaggtcgttcgctccaagctgggctgtgtgcacgaaccccccgttcagcccgaccgctgcgccttatccggtaactatcgtcttgagtccaacccggtaagacacgacttatcgccactggcagcagccactggtaacaggattagcagagcgaggtatgtaggcggtgctacagagttcttgaagtggtggcctaactacggctacactagaagaacagtatttggtatctgcgctctgctgaagccagttaccttcggaaaaagagttggtagctcttgatccggcaaacaaaccaccgctggtagcggtggtttttttgtttgcaagcagcagattacgcgcagaaaaaaaggatctcaagaagatcctttgatcttttctacggggtctgacgctcagtggaacgaaaactcacgttaagggattttggtcatgagattatcaaaaaggatcttcacctagatccttttaaattaaaaatgaagttttaaatcaatctaaagtatatatgagtaaacttggtctgacagttaccaatgcttaatcagtgaggcacctatctcagcgatctgtctatttcgttcatccatagttgcctgactccccgtcgtgtagataactacgatacgggagggcttaccatctggccccagtgctgcaatgataccgcgagacccacgctcaccggctccagatttatcagcaataaaccagccagccggaagggccgagcgcagaagtggtcctgcaactttatccgcctccatccagtctattaattgttgccgggaagctagagtaagtagttcgccagttaatagtttgcgcaacgttgttgccattgctacaggcatcgtggtgtcacgctcgtcgtttggtatggcttcattcagctccggttcccaacgatcaaggcgagttacatgatcccccatgttgtgcaaaaaagcggttagctccttcggtcctccgatcgttgtcagaagtaagttggccgcagtgttatcactcatggttatggcagcactgcataattctcttactgtcatgccatccgtaagatgcttttctgtgactggtgagtactcaaccaagtcattctgagaatagtgtatgcggcgaccgagttgctcttgcccggcgtcaatacgggataataccgcgccacatagcagaactttaaaagtgctcatcattggaaaacgttcttcggggcgaaaactctcaaggatcttaccgctgttgagatccagttcgatgtaacccactcgtgcacccaactgatcttcagcatcttttactttcaccagcgtttctgggtgagcaaaaacaggaaggcaaaatgccgcaaaaaagggaataagggcgacacggaaatgttgaatactcatactcttcctttttcaatattattgaagcatttatcagggttattgtctcatgagcggatacatatttgaatgtatttagaaaaataaacaaataggggttccgcgcacatttccccgaaaagtgccacctgatgcggtgtgaaataccgcacagatgcgtaaggagaaaataccgcatcaggaaattgtaagcgttaatattttgttaaaattcgcgttaaatttttgttaaatcagctcattttttaaccaataggccgaaatcggcaaaatcccttataaatcaaaagaatagaccgagatagggttgagtgttgttccagtttggaacaagagtccactattaaagaacgtggactccaacgtcaaagggcgaaaaaccgtctatcagggcgatggcccactacgtgaaccatcaccctaatcaagttttttggggtcgaggtgccgtaaagcactaaatcggaaccctaaagggagcccccgatttagagcttgacggggaaagccggcgaacgtggcgagaaaggaagggaagaaagcgaaaggagcgggcgctagggcgctggcaagtgtagcggtcacgctgcgcgtaaccaccacacccgccgcgcttaatgcgccgctacagggcgcgtccattcgccattcaggctgcgcaactgttgggaagggcgatcggtgcgggcctcttcgctattacgccagctggcgaaagggggatgtgctgcaaggcgattaagttgggtaacgccagggttttcccagtcacgacgttgtaaaacgacggccagtgaattgtaatacgactcactatagggcgaattgggcccgacgtcgcatgctcccggccgccatggcggccgcgggaattcgattagcggccgcaccatgaaggtgggcgatggaggagaagtcttctttgtgttcgagaccgacgcagacgtgcccgaagagctcctgacatcccccgtcatttctccctcttcgtcgccatcctggggccaggaggaaggcggggatggtgagccggactaccttgctctgaacgactctaaacagggtggcgacagcaagcacggcagatcgccctcggagggcccaccattcagatcaccttcggcggatcacttacatgagatgggcagcttcgatgatgagaatgaccctgaggtgaacagaagacaacgtgcgagcacggcagctccagagcctgttcctggttcgttgaaacacccagccactatctcggaaggcatctcttcggcctcgttttccaacagcgatactgatcgaacagacacttctggacccacagagacagaacccacagagctcacagagcctacagagcccacagagcccacagagcctctggatcttgagcagagtctccaccgggctgccacttctcccgccccttcgtccgaggagatttgggagaaggcccgtgcactgtccaagaaactcacatcagaaaacattcagagtaaaatctccgacaacggagacattattctggatatgactggttacaagtacgaccacgaggacgtgagtcgatcagaggagctggtcaagaaaatcctcgctgaggaactgggagaagacagagacctgtcccacatcctggttgaagacgaggagggtaaccttgtgattcagagcgctggagacagccaccatcacgagcatatgagctcgcccgagtctctggcccactcccctcagcccctcccttcttctaaccttccgtctcaggcctcggacaacaagcactacgccaagaccatccgtttgacgtctgaccagctcaagtctctggatctcaagcccggcaagaacgaggtcacctttgctgtcaataacggcaagacgtcgtgttcggcccagctgttctactggaagtacgacattcctgttgtcatttccgacattgatggcacgatcaccaagtccgatgctctgggccatctgctcaccatgatgggccgagactggacccacaccggcgtggccaagctcttttccgatatcagagccaacgggtataatatcatgtatctgacagcacgatcagtgggacaggcagatgcaaccagggcatatctaggcggtgttgaccagtttggcttcaagctgcctccaggacccgtcatcttgtcgcctgatagaaccctggcggctctcaagagagaggtgattcttaagaaacctgaggtattcaagatggcgtgtctgcgggacattaagtcgctgtttggcgagaccgaagacgccaccaatccattctacgctggatttggcaaccgaatcaccgacgcgttgtcgtatagatctgtcggtgtgccgtcgtctagaatcttcacaatcaactcgaacgccgaggtccatatggagctgcttgaactggctggctacaagtcctcgtatgtccacattgccgatcttgtcgaccactttttccctccggaaagcgagttcacgaccattcaggaggaaaaatacacggacgtcaactactggcgagatcccattattgacctgtctgatctgaccgacgacgagctgactgacgatgatgagctctccaagtcgcccaagtcgcccagatctcctagaagcccgcgggccggttcggcaggctccagcgcggctccctcaggctcgggcgccgaccctgccggaccctccgagccgaaggactccgcgaacccgtcgaagttcagctataagaaggctcctacgaactctcgattccagcccgtttcgtacgatcttgatcttgacgacggatacgagtacgacgatgacgatgactatgatgacgatgaggagtttgtggacgctgagagcgacgcgctggaggaggatgacgacgatgatgatgacgtcgacctagacaacgactctgaccactcccctgtcaagccgccctcgcagatgcagcgagtcatcaacaagactattgaggacaacaagggcctgcacatggatgaggatgacgttcaaaaagccatgaaggccctgaagatggaacgagcaagcatcaatcctgagtaagcggccgct

SEQ ID NO: 145 - DNA, 7435 bp, Artificial Sequence
  plasmid pKR1349
  misc_feature (4340)..(4340): n is a, c, g, or t
ggccgcgacacaagtgtgagagtactaaataaatgctttggttgtacgaaatcattacactaaataaaataatcaaagcttatatatgccttccgctaaggccgaatgcaaagaaattggttctttctcgttatcttttgccacttttactagtacgtattaattactacttaatcatctttgtttacggctcattatatccggtctagaggatccaaggccgcgaagttaaaagcaatgttgtcacttgtcgtactaacacatgatgtgatagtttatgctagctagctataacataagctgtctctgagtgtgttgtatattaataaagatcatcactggtgaatggtgatcgtgtacgtaccctacttagtaggcaatggaagcacttagagtgtgctttgtgcatggccttgcctctgttttgagacttttgtaatgttttcgagtttaaatctttgcctttgcgtacgtgggcggatcccccgggctgcaggaattcactggccgtcgttttacaacgtcgtgactgggaaaaccctggcgttacccaacttaatcgccttgcagcacatccccctttcgccagctggcgtaatagcgaagaggcccgcaccgatcgcccttcccaacagttgcgcagcctgaatggcgaatggcgcctgatgcggtattttctccttacgcatctgtgcggtatttcacaccgcatatggtgcactctcagtacaatctgctctgatgccgcatagttaagccagccccgacacccgccaacacccgctgacgcgccctgacgggcttgtctgctcccggcatccgcttacagacaagctgtgaccgtctccgggagctgcatgtgtcagaggttttcaccgtcatcaccgaaacgcgcgagacgaaagggcctcgtgatacgcctatttttataggttaatgtcatgataataatggtttcttagacgtcaggtggcacttttcggggaaatgtgcgcggaacccctatttgtttatttttctaaatacattcaaatatgtatccgctcatgagacaataaccctgataaatgcttcaataatattgaaaaaggaagagtatgagtattcaacatttccgtgtcgcccttattcccttttttgcggcattttgccttcctgtttttgctcacccagaaacgctggtgaaagtaaaagatgctgaagatcagttgggtgcacgagtgggttacatcgaactggatctcaacagcggtaagatccttgagagttttcgccccgaagaacgttttccaatgatgagcacttttaaagttctgctatgtggcgcggtattatcccgtattgacgccgggcaagagcaactcggtcgccgcatacactattctcagaatgacttggttgagtactcaccagtcacagaaaagcatcttacggatggcatgacagtaagagaattatgcagtgctgccataaccatgagtgataacactgcggccaacttacttctgacaacgatcggaggaccgaaggagctaaccgcttttttgcacaacatgggggatcatgtaactcgccttgatcgttgggaaccggagctgaatgaagccataccaaacgacgagcgtgacaccacgatgcctgtagcaatggcaacaacgttgcgcaaactattaactggcgaactacttactctagcttcccggcaacaattaatagactggatggaggcggataaagttgcaggaccacttctgcgctcggcccttccggctggctggtttattgctgataaatctggagccggtgagcgtgggtctcgcggtatcattgcagcactggggccagatggtaagccctcccgtatcgtagttatctacacgacggggagtcaggcaactatggatgaacgaaatagacagatcgctgagataggtgcctcactgattaagcattggtaactgtcagaccaagtttactcatatatactttagattgatttaaaacttcatttttaatttaaaaggatctaggtgaagatcctttttgataatctcatgaccaaaatcccttaacgtgagttttcgttccactgagcgtcagaccccgtagaaaagatcaaaggatcttcttgagatcctttttttctgcgcgtaatctgctgcttgcaaacaaaaaaaccaccgctaccagcggtggtttgtttgccggatcaagagctaccaactctttttccgaaggtaactggcttcagcagagcgcagataccaaatactgtccttctagtgtagccgtagttaggccaccacttcaagaactctgtagcaccgcctacatacctcgctctgctaatcctgttaccagtggctgctgccagtggcgataagtcgtgtcttaccgggttggactcaagacgatagttaccggataaggcgcagcggtcgggctgaacggggggttcgtgcacacagcccagcttggagcgaacgacctacaccgaactgagatacctacagcgtgagctatgagaaagcgccacgcttcccgaagggagaaaggcggacaggtatccggtaagcggcagggtcggaacaggagagcgcacgagggagcttccagggggaaacgcctggtatctttatagtcctgtcgggtttcgccacctctgacttgagcgtcgatttttgtgatgctcgtcaggggggcggagcctatggaaaaacgccagcaacgcggcctttttacggttcctggccttttgctggccttttgctcacatgttctttcctgcgttatcccctgattctgtggataaccgtattaccgcctttgagtgagctgataccgctcgccgcagccgaacgaccgagcgcagcgagtcagtgagcgaggaagcggaagagcgcccaatacgcaaaccgcctctccccgcgcgttggccgattcattaatgcagctggcacgacaggtttcccgactggaaagcgggcagtgagcgcaacgcaattaatgtgagttagctcactcattaggcaccccaggctttacactttatgcttccggctcgtatgttgtgtggaattgtgagcggataacaatttcacacaggaaacagctatgaccatgattacgccaagcttgcatgcctgcaggtcgactcgacgtacgtcctcgaagagaagggttaataacacattttttaacatttttaacacaaattttagttatttaaaaatttattaaaaaatttaaaataagaagaggaactctttaaataaatctaacttacaaaatttatgatttttaataagttttcaccaataaaaaatgtcataaaaatatgttaaaaagtatattatcaatattctctttatgataaataaaaagaaaaaaaaaataaaagttaagtgaaaatgagattgaagtgactttaggtgtgtataaatatatcaaccccgccaacaatttatttaatccaaatatattgaagtatattattccatagcctttatttatttatatatttattatataaaagctttatttgttctaggttgttcatgaaatatttttttggttttatctccgttgtaagaaaatcatgtgctttgtgtcgccactcactattgcagctttttcatgcattggtcagattgacggttgattgtatttttgttttttatggttttgtgttatgacttaagtcttcatctctttatctcttcatcaggtttgatggttacctaatatggtccatgggtacatgcatggttaaattaggtggccaactttgttgtgaacgatagaattttttttatattaagtaaactatttttatattatgaaataataataaaaaaaatattttatcattattaacaaaatcatattagttaatttgttaactctataataaaagaaatactgtaacattcacattacatggtaacatctttccaccctttcatttgttttttgtttgatgactttttttcttgtttaaatttatttcccttcttttaaatttggaatacattatcatcatatataaactaaaatactaaaaacaggattacacaaatgataaataataacacaaatatttataaatctagctgcaatatatttaaactagctatatcgatattgtaaaataaaactagctgcattgatactgataaaaaaatatcatgtgctttctggactgatgatgcagtatacttttgacattgcctttattttatttttcagaaaagctttcttagttctgggttcttcattatttgtttcccatctccattgtgaattgaatcatttgcttcgtgtcacaaatacaatttagntaggtacatgcattggtcagattcacggtttattatgtcatgacttaagttcatggtagtacattacctgccacgcatgcattatattggttagatttgataggcaaatttggttgtcaacaatataaatataaataatgtttttatattacgaaataacagtgatcaaaacaaacagttttatctttattaacaagattttgtttttgtttgatgacgttttttaatgtttacgctttcccccttcttttgaatttagaacactttatcatcataaaatcaaatactaaaaaaattacatatttcataaataataacacaaatatttttaaaaaatctgaaataataatgaacaatattacatattatcacgaaaattcattaataaaaatattatataaataaaatgtaatagtagttatatgtaggaaaaaagtactgcacgcataatatatacaaaaagattaaaatgaactattataaataataacactaaattaatggtgaatcatatcaaaataatgaaaaagtaaataaaatttgtaattaacttctatatgtattacacacacaaataataaataatagtaaaaaaaattatgataaatatttaccatctcataagatatttaaaataatgataaaaatatagattattttttatgcaactagctagccaaaaagagaacacgggtatatataaaaagagtacctttaaattctactgtacttcctttattcctgacgtttttatatcaagtggacatacgtgaagattttaattatcagtctaaatatttcattagcacttaatacttttctgttttattcctatcctataagtagtcccgattctcccaacattgcttattcacacaactaactaagaaagtcttccatagccccccaagcggccgcaccatgaaggtgggcgatggaggagaagtcttctttgtgttcgagaccgacgcagacgtgcccgaagagctcctgacatcccccgtcatttctccctcttcgtcgccatcctggggccaggaggaaggcggggatggtgagccggactaccttgctctgaacgactctaaacagggtggcgacagcaagcacggcagatcgccctcggagggcccaccattcagatcaccttcggcggatcacttacatgagatgggcagcttcgatgatgagaatgaccctgaggtgaacagaagacaacgtgcgagcacggcagctccagagcctgttcctggttcgttgaaacacccagccactatctcggaaggcatctcttcggcctcgttttccaacagcgatactgatcgaacagacacttctggacccacagagacagaacccacagagctcacagagcctacagagcccacagagcccacagagcctctggatcttgagcagagtctccaccgggctgccacttctcccgccccttcgtccgaggagatttgggagaaggcccgtgcactgtccaagaaactcacatcagaaaacattcagagtaaaatctccgacaacggagacattattctggatatgactggttacaagtacgaccacgaggacgtgagtcgatcagaggagctggtcaagaaaatcctcgctgaggaactgggagaagacagagacctgtcccacatcctggttgaagacgaggagggtaaccttgtgattcagagcgctggagacagccaccatcacgagcatatgagctcgcccgagtctctggcccactcccctcagcccctcccttcttctaaccttccgtctcaggcctcggacaacaagcactacgccaagaccatccgtttgacgtctgaccagctcaagtctctggatctcaagcccggcaagaacgaggtcacctttgctgtcaataacggcaagacgtcgtgttcggcccagctgttctactggaagtacgacattcctgttgtcatttccgacattgatggcacgatcaccaagtccgatgctctgggccatctgctcaccatgatgggccgagactggacccacaccggcgtggccaagctcttttccgatatcagagccaacgggtataatatcatgtatctgacagcacgatcagtgggacaggcagatgcaaccagggcatatctaggcggtgttgaccagtttggcttcaagctgcctccaggacccgtcatcttgtcgcctgatagaaccctggcggctctcaagagagaggtgattcttaagaaacctgaggtattcaagatggcgtgtctgcgggacattaagtcgctgtttggcgagaccgaagacgccaccaatccattctacgctggatttggcaaccgaatcaccgacgcgttgtcgtatagatctgtcggtgtgccgtcgtctagaatcttcacaatcaactcgaacgccgaggtccatatggagctgcttgaactggctggctacaagtcctcgtatgtccacattgccgatcttgtcgaccactttttccctccggaaagcgagttcacgaccattcaggaggaaaaatacacggacgtcaactactggcgagatcccattattgacctgtctgatctgaccgacgacgagctgactgacgatgatgagctctccaagtcgcccaagtcgcccagatctcctagaagcccgcgggccggttcggcaggctccagcgcggctccctcaggctcgggcgccgaccctgccggaccctccgagccgaaggactccgcgaacccgtcgaagttcagctataagaaggctcctacgaactctcgattccagcccgtttcgtacgatcttgatcttgacgacggatacgagtacgacgatgacgatgactatgatgacgatgaggagtttgtggacgctgagagcgacgcgctggaggaggatgacgacgatgatgatgacgtcgacctagacaacgactctgaccactcccctgtcaagccgccctcgcagatgcagcgagtcatcaacaagactattgaggacaacaagggcctgcacatggatgaggatgacgttcaaaaagccatgaaggccctgaagatggaacgagcaagcatcaatcctgagtaagc

SEQ ID NO: 146 - DNA, 1197 bp, Yarrowia lipolytica
atgagcgctctacttcgatcgtccctgcgttttaaacacatgtccgccgtcaaccgtctcacacaacagcttcgactgctgaccgcctccgcgcctctcagcgcagccaacaccgccggcaaggctcctttcaaggtcgccgttgttggttctggtaactggggaaccaccgtcgccaagattgtcgccgagaactgcactgctcaccccgagctctttgagcccgaggttcgagtctgggttcgagaagagaaggtcaacggcaagaacctgaccgacattttcaacgctgagcacgagaacgtgcgatacctccctaaaatcaaacttcctcacaacctgatcgccgagccggatctgctcaaggccgtcgagggtgccaacatcattgtcttcaacctgccccatcagttcctggctggtgtctgcaagcagctcaagggccacgtcaaccccaaggctagagccatctcctgcctcaagggtctagatgtcaccccccagggtgtttacctgctctccgacgttatcgagaacgagaccggtctccactgcggtgttctgtccggggctaacctcgccaccgagatcgctctggagaagtactccgagactaccgttgcttacaaccgacccaaggacttctttggcgagggtgatgtgaccaacgatgtgctcaaggctctgttccaccgaccctacttccatgtgcgatgcgttcaggacgtcgccggtgtctccatcggaggtgcccttaagaacgttgttgccctttgcgccggtttcgtcgagggcaagaactggggagacaacgccaaggccgcaattatgcgacgaggcatgcttgagatgatcaacttctccaagcgattctttcccgaaactgatattaacactcttacagtcgagtctgccggtgtggccgatctcatcacctcgtgcgctggaggccgaaacttcaaggtcggccgagcattcggaaaggagagcggctccggcaagaccatccaggacgtggagaaggagcttctcaacggccagtccgcccagggcgtcatcacatgcaacgaggtccacgagctgctcaagaacaagaacatgcagaaggacttccctctgttcgagtccacctggggcattatccacggtgagctcaagattgatgatctccccgagattctttaccacgccaactag

SEQ ID NO: 147 - protein, 398 aa, Yarrowia lipolytica
MSALLRSSLRFKHMSAVNRLTQQLRLLTASAPLSAANTAGKAPFKVAVVGSGNWGTTVAKIVAENCTAHPELFEPEVRVWVREEKVNGKNLTDIFNAEHENVRYLPKIKLPHNLIAEPDLLKAVEGANIIVFNLPHQFLAGVCKQLKGHVNPKARAISCLKGLDVTPQGVYLLSDVIENETGLHCGVLSGANLATEIALEKYSETTVAYNRPKDFFGEGDVTNDVLKALFHRPYFHVRCVQDVAGVSIGGALKNVVALCAGFVEGKNWGDNAKAAIMRRGMLEMINFSKRFFPETDINTLTVESAGVADLITSCAGGRNFKVGRAFGKESGSGKTIQDVEKELLNGQSAQGVITCNEVHELLKNKNMQKDFPLFESTWGIIHGELKIDDLPEILYHAN

SEQ ID NO: 148 - DNA, 32 bp, Artificial Sequence
  primer YlGPD-5
gcggccgcaccatgagcgctctacttcgatcg

SEQ ID NO: 149 - DNA, 46 bp, Artificial Sequence
  primer YlGPD-3-2
caatcttggcgacggtggttccccagttaccagaaccaacaacggc

SEQ ID NO: 150 - DNA, 46 bp, Artificial Sequence
  primer YlGPD-intron-5-2
gccgttgttggttctggtaactggggaaccaccgtcgccaagattg

SEQ ID NO: 151 - DNA, 30 bp, Artificial Sequence
  primer YlGPD-3
gcggccgcctagttggcgtggtaaagaatc

SEQ ID NO: 152 - DNA, 4729 bp, Artificial Sequence
  plasmid pHD36
cctgaattccagcacactggcggccgttactagtggatccgagctcggtaccaagcttgatgcatagcttgagtattctaacgcgtcacctaaatagcttggcgtaatcatggtcatagctgtttcctgtgtgaaattgttatccgctcacaattccacacaacatacgagccggaagcataaagtgtaaagcctggggtgcctaatgagtgagctaactcacattaattgcgttgcgctcactgcccgctttccagtcgggaaacctgtcgtgccagctgcattaatgaatcggccaacgcgcggggagaggcggtttgcgtattgggcgctcttccgcttcctcgctcactgactcgctgcgctcggtcgttcggctgcggcgagcggtatcagctcactcaaaggcggtaatacggttatccacagaatcaggggataacgcaggaaagaacatgtgagcaaaaggccagcaaaaggccaggaaccgtaaaaaggccgcgttgctggcgtttttccataggctccgcccccctgacgagcatcacaaaaatcgacgctcaagtcagaggtggcgaaacccgacaggactataaagataccaggcgtttccccctggaagctccctcgtgcgctctcctgttccgaccctgccgcttaccggatacctgtccgcctttctcccttcgggaagcgtggcgctttctcatagctcacgctgtaggtatctcagttcggtgtaggtcgttcgctccaagctgggctgtgtgcacgaaccccccgttcagcccgaccgctgcgccttatccggtaactatcgtcttgagtccaacccggtaagacacgacttatcgccactggcagcagccactggtaacaggattagcagagcgaggtatgtaggcggtgctacagagttcttgaagtggtggcctaactacggctacactagaagaacagtatttggtatctgcgctctgctgaagccagttaccttcggaaaaagagttggtagctcttgatccggcaaacaaaccaccgctggtagcggtggtttttttgtttgcaagcagcagattacgcgcagaaaaaaaggatctcaagaagatcctttgatcttttctacggggtctgacgctcagtggaacgaaaactcacgttaagggattttggtcatgagattatcaaaaaggatcttcacctagatccttttaaattaaaaatgaagttttagcacgtgtcagtcctgctcctcggccacgaagtgcacgcagttgccggccgggtcgcgcagggcgaactcccgcccccacggctgctcgccgatctcggtcatggccggcccggaggcgtcccggaagttcgtggacacgacctccgaccactcggcgtacagctcgtccaggccgcgcacccacacccaggccagggtgttgtccggcaccacctggtcctggaccgcgctgatgaacagggtcacgtcgtcccggaccacaccggcgaagtcgtcctccacgaagtcccgggagaacccgagccggtcggtccagaactcgaccgctccggcgacgtcgcgcgcggtgagcaccggaacggcactggtcaacttggccatggtggccctcctcacgtgctattattgaagcatttatcagggttattgtctcatgagcggatacatatttgaatgtatttagaaaaataaacaaataggggttccgcgcacatttccccgaaaagtgccacctgatgcggtgtgaaataccgcacagatgcgtaaggagaaaataccgcatcaggaaattgtaagcgttaataattcagaagaactcgtcaagaaggcgatagaaggcgatgcgctgcgaatcgggagcggcgataccgtaaagcacgaggaagcggtcagcccattcgccgccaagctcttcagcaatatcacgggtagccaacgctatgtcctgatagcggtccgccacacccagccggccacagtcgatgaatccagaaaagcggccattttccaccatgatattcggcaagcaggcatcgccatgggtcacgacgagatcctcgccgtcgggcatgctcgccttgagcctggcgaacagttcggctggcgcgagcccctgatgctcttcgtccagatcatcctgatcgacaagaccggcttccatccgagtacgtgctcgctcgatgcgatgtttcgcttggtggtcgaatgggcaggtagccggatcaagcgtatgcagccgccgcattgcatcagccatgatggatactttctcggcaggagcaaggtgagatgacaggagatcctgccccggcacttcgcccaatagcagccagtcccttcccgcttcagtgacaacgtcgagcacagctgcgcaaggaacgcccgtcgtggccagccacgatagccgcgctgcctcgtcttgcagttcattcagggcaccggacaggtcggtcttgacaaaaagaaccgggcgcccctgcgctgacagccggaacacggcggcatcagagcagccgattgtctgttgtgcccagtcatagccgaatagcctctccacccaagcggccggagaacctgcgtgcaatccatcttgttcaatcatgcgaaacgatcctcatcctgtctcttgatcagagcttgatcccctgcgccatcagatccttggcggcaagaaagccatccagtttactttgcagggcttcccaaccttaccagagggcgccccagctggcaattccggttcgcttgctgtccataaaaccgcccagtctagctatcgccatgtaagcccactgcaagctacctgctttctctttgcgcttgcgttttcccttgtccagatagcccagtagctgacattcatccggggtcagcaccgtttctgcggactggctttctacgtgaaaaggatctaggtgaagatcctttttgataatctcatgcctgacatttatattccccagaacatcaggttaatggcgtttttgatgtcattttcgcggtggctgagatcagccacttcttccccgataacggagaccggcacactggccatatcggtggtcatcatgcgccagctttcatccccgatatgcaccaccgggtaaagttcacgggagactttatctgacagcagacgtgcactggccagggggatcaccatccgtcgccccggcgtgtcaataatatcactctgtacatccacaaacagacgataacggctctctcttttataggtgtaaaccttaaactgccgtacgtataggctgcgcaactgttgggaagggcgatcggtgcgggcctcttcgctattacgccagctggcgaaagggggatgtgctgcaaggcgattaagttgggtaacgccagggttttcccagtcacgacgttgtaaaacgacggccagtgaattgtaatacgactcactatagggcgaattgggccctctagatgcatgctcgagcggccgccagtgtgatggatatctgcagaattcagggcggccgcctagttggcgtggtaaagaatctcggggagatcatcaatcttgagctcaccgtggataatgccccaggtggactcgaacagagggaagtccttctgcatgttcttgttcttgagcagctcgtggacctcgttgcatgtgatgacgccctgggcggactggccgttgagaagctccttctccacgtcctggatggtcttgccggagccgctctcctttccgaatgctcggccgaccttgaagtttcggcctccagcgcacgaggtgatgagatcggccacaccggcagactcgactgtaagagtgttaatatcagtttcgggaaagaatcgcttggagaagttgatcatctcaagcatgcctcgtcgcataattgcggccttggcgttgtctccccagttcttgccctcgacgaaaccggcgcaaagggcaacaacgttcttaagggcacctccgatggagacaccggcgacgtcctgaacgcatcgcacatggaagtagggtcggtggaacagagccttgagcacatcgttggtcacatcaccctcgccaaagaagtccttgggtcggttgtaagcaacggtagtctcggagtacttctccagagcgatctcggtggcgaggttagccccggacagaacaccgcagtggagaccggtctcgttctcgataacgtcggagagcaggtaaacaccctggggggtgacatctagacccttgaggcaggagatggctctagccttggggttgacgtggcccttgagctgcttgcagacaccagccaggaactgatggggcaggttgaagacaatgatgttggcaccctcgacggccttgagcagatccggctcggcgatcaggttgtgaggaagtttgattttagggaggtatcgcacgttctcgtgctcagcgttgaaaatgtcggtcaggttcttgccgttgaccttctcttctcgaacccagactcgaacctcgggctcaaagagctcggggtgagcagtgcagttctcggcgacaatcttggcgacggtggttccccagttaccagaaccaacaacggcgaccttgaaaggagccttgccggcggtgttggctgcgctgagaggcgcggaggcggtcagcagtcgaagctgttgtgtgagacggttgacggcggacatgtgtttaaaacgcagggacgatcgaagtagagcgctcatggtgcggccgct

SEQ ID NO: 153 - DNA, 5249 bp, Artificial Sequence
  plasmid pKR1273
  misc_feature (3843)..(3843): n is a, c, g, or t
aattcactggccgtcgttttacaacgtcgtgactgggaaaaccctggcgttacccaacttaatcgccttgcagcacatccccctttcgccagctggcgtaatagcgaagaggcccgcaccgatcgcccttcccaacagttgcgcagcctgaatggcgaatggcgcctgatgcggtattttctccttacgcatctgtgcggtatttcacaccgcatatggtgcactctcagtacaatctgctctgatgccgcatagttaagccagccccgacacccgccaacacccgctgacgcgccctgacgggcttgtctgctcccggcatccgcttacagacaagctgtgaccgtctccgggagctgcatgtgtcagaggttttcaccgtcatcaccgaaacgcgcgagacgaaagggcctcgtgatacgcctatttttataggttaatgtcatgataataatggtttcttagacgtcaggtggcacttttcggggaaatgtgcgcggaacccctatttgtttatttttctaaatacattcaaatatgtatccgctcatgagacaataaccctgataaatgcttcaataatattgaaaaaggaagagtatgagtattcaacatttccgtgtcgcccttattcccttttttgcggcattttgccttcctgtttttgctcacccagaaacgctggtgaaagtaaaagatgctgaagatcagttgggtgcacgagtgggttacatcgaactggatctcaacagcggtaagatccttgagagttttcgccccgaagaacgttttccaatgatgagcacttttaaagttctgctatgtggcgcggtattatcccgtattgacgccgggcaagagcaactcggtcgccgcatacactattctcagaatgacttggttgagtactcaccagtcacagaaaagcatcttacggatggcatgacagtaagagaattatgcagtgctgccataaccatgagtgataacactgcggccaacttacttctgacaacgatcggaggaccgaaggagctaaccgcttttttgcacaacatgggggatcatgtaactcgccttgatcgttgggaaccggagctgaatgaagccataccaaacgacgagcgtgacaccacgatgcctgtagcaatggcaacaacgttgcgcaaactattaactggcgaactacttactctagcttcccggcaacaattaatagactggatggaggcggataaagttgcaggaccacttctgcgctcggcccttccggctggctggtttattgctgataaatctggagccggtgagcgtgggtctcgcggtatcattgcagcactggggccagatggtaagccctcccgtatcgtagttatctacacgacggggagtcaggcaactatggatgaacgaaatagacagatcgctgagataggtgcctcactgattaagcattggtaactgtcagaccaagtttactcatatatactttagattgatttaaaacttcatttttaatttaaaaggatctaggtgaagatcctttttgataatctcatgaccaaaatcccttaacgtgagttttcgttccactgagcgtcagaccccgtagaaaagatcaaaggatcttcttgagatcctttttttctgcgcgtaatctgctgcttgcaaacaaaaaaaccaccgctaccagcggtggtttgtttgccggatcaagagctaccaactctttttccgaaggtaactggcttcagcagagcgcagataccaaatactgtccttctagtgtagccgtagttaggccaccacttcaagaactctgtagcaccgcctacatacctcgctctgctaatcctgttaccagtggctgctgccagtggcgataagtcgtgtcttaccgggttggactcaagacgatagttaccggataaggcgcagcggtcgggctgaacggggggttcgtgcacacagcccagcttggagcgaacgacctacaccgaactgagatacctacagcgtgagctatgagaaagcgccacgcttcccgaagggagaaaggcggacaggtatccggtaagcggcagggtcggaacaggagagcgcacgagggagcttccagggggaaacgcctggtatctttatagtcctgtcgggtttcgccacctctgacttgagcgtcgatttttgtgatgctcgtcaggggggcggagcctatggaaaaacgccagcaacgcggcctttttacggttcctggccttttgctggccttttgctcacatgttctttcctgcgttatcccctgattctgtggataaccgtattaccgcctttgagtgagctgataccgctcgccgcagccgaacgaccgagcgcagcgagtcagtgagcgaggaagcggaagagcgcccaatacgcaaaccgcctctccccgcgcgttggccgattcattaatgcagctggcacgacaggtttcccgactggaaagcgggcagtgagcgcaacgcaattaatgtgagttagctcactcattaggcaccccaggctttacactttatgcttccggctcgtatgttgtgtggaattgtgagcggataacaatttcacacaggaaacagctatgaccatgattacgccaagcttgcatgcctgcaggtcgactcgacgtacgtcctcgaagagaagggttaataacacattttttaacatttttaacacaaattttagttatttaaaaatttattaaaaaatttaaaataagaagaggaactctttaaataaatctaacttacaaaatttatgatttttaataagttttcaccaataaaaaatgtcataaaaatatgttaaaaagtatattatcaatattctctttatgataaataaaaagaaaaaaaaaataaaagttaagtgaaaatgagattgaagtgactttaggtgtgtataaatatatcaaccccgccaacaatttatttaatccaaatatattgaagtatattattccatagcctttatttatttatatatttattatataaaagctttatttgttctaggttgttcatgaaatatttttttggttttatctccgttgtaagaaaatcatgtgctttgtgtcgccactcactattgcagctttttcatgcattggtcagattgacggttgattgtatttttgttttttatggttttgtgttatgacttaagtcttcatctctttatctcttcatcaggtttgatggttacctaatatggtccatgggtacatgcatggttaaattaggtggccaactttgttgtgaacgatagaattttttttatattaagtaaactatttttatattatgaaataataataaaaaaaatattttatcattattaacaaaatcatattagttaatttgttaactctataataaaagaaatactgtaacattcacattacatggtaacatctttccaccctttcatttgttttttgtttgatgactttttttcttgtttaaatttatttcccttcttttaaatttggaatacattatcatcatatataaactaaaatactaaaaacaggattacacaaatgataaataataacacaaatatttataaatctagctgcaatatatttaaactagctatatcgatattgtaaaataaaactagctgcattgatactgataaaaaaatatcatgtgctttctggactgatgatgcagtatacttttgacattgcctttattttatttttcagaaaagctttcttagttctgggttcttcattatttgtttcccatctccattgtgaattgaatcatttgcttcgtgtcacaaatacaatttagntaggtacatgcattggtcagattcacggtttattatgtcatgacttaagttcatggtagtacattacctgccacgcatgcattatattggttagatttgataggcaaatttggttgtcaacaatataaatataaataatgtttttatattacgaaataacagtgatcaaaacaaacagttttatctttattaacaagattttgtttttgtttgatgacgttttttaatgtttacgctttcccccttcttttgaatttagaacactttatcatcataaaatcaaatactaaaaaaattacatatttcataaataataacacaaatatttttaaaaaatctgaaataataatgaacaatattacatattatcacgaaaattcattaataaaaatattatataaataaaatgtaatagtagttatatgtaggaaaaaagtactgcacgcataatatatacaaaaagattaaaatgaactattataaataataacactaaattaatggtgaatcatatcaaaataatgaaaaagtaaataaaatttgtaattaacttctatatgtattacacacacaaataataaataatagtaaaaaaaattatgataaatatttaccatctcataagatatttaaaataatgataaaaatatagattattttttatgcaactagctagccaaaaagagaacacgggtatatataaaaagagtacctttaaattctactgtacttcctttattcctgacgtttttatatcaagtggacatacgtgaagattttaattatcagtctaaatatttcattagcacttaatacttttctgttttattcctatcctataagtagtcccgattctcccaacattgcttattcacacaactaactaagaaagtcttccatagccccccaagcggccgcgacacaagtgtgagagtactaaataaatgctttggttgtacgaaatcattacactaaataaaataatcaaagcttatatatgccttccgctaaggccgaatgcaaagaaattggttctttctcgttatcttttgccacttttactagtacgtattaattactacttaatcatctttgtttacggctcattatatccggtctaggccaaggccgcgaagttaaaagcaatgttgtcacttgtacgtactaacacatgatgtgatagtttatgctagctagctataacataagctgtctctgagtgtgttgtatattaataaagatcatcactggtgaatggtgatcgtgtacgtaccctacttagtaggcaatggaagcacttagagtgtgctttgtgcatggccttgcctctgttttgagacttttgtaatgttttcgagtttaaatctttgcctttgcgtacgtgggcggatcccctgcaggacctg

SEQ ID NO: 154 - DNA, 6457 bp, Artificial Sequence
  plasmid pKR1369
  misc_feature (4337)..(4337): n is a, c, g, or t
ggccgcgacacaagtgtgagagtactaaataaatgctttggttgtacgaaatcattacactaaataaaataatcaaagcttatatatgccttccgctaaggccgaatgcaaagaaattggttctttctcgttatcttttgccacttttactagtacgtattaattactacttaatcatctttgtttacggctcattatatccggtctaggccaaggccgcgaagttaaaagcaatgttgtcacttgtacgtactaacacatgatgtgatagtttatgctagctagctataacataagctgtctctgagtgtgttgtatattaataaagatcatcactggtgaatggtgatcgtgtacgtaccctacttagtaggcaatggaagcacttagagtgtgctttgtgcatggccttgcctctgttttgagacttttgtaatgttttcgagtttaaatctttgcctttgcgtacgtgggcggatcccctgcaggacctgaattcactggccgtcgttttacaacgtcgtgactgggaaaaccctggcgttacccaacttaatcgccttgcagcacatccccctttcgccagctggcgtaatagcgaagaggcccgcaccgatcgcccttcccaacagttgcgcagcctgaatggcgaatggcgcctgatgcggtattttctccttacgcatctgtgcggtatttcacaccgcatatggtgcactctcagtacaatctgctctgatgccgcatagttaagccagccccgacacccgccaacacccgctgacgcgccctgacgggcttgtctgctcccggcatccgcttacagacaagctgtgaccgtctccgggagctgcatgtgtcagaggttttcaccgtcatcaccgaaacgcgcgagacgaaagggcctcgtgatacgcctatttttataggttaatgtcatgataataatggtttcttagacgtcaggtggcacttttcggggaaatgtgcgcggaacccctatttgtttatttttctaaatacattcaaatatgtatccgctcatgagacaataaccctgataaatgcttcaataatattgaaaaaggaagagtatgagtattcaacatttccgtgtcgcccttattcccttttttgcggcattttgccttcctgtttttgctcacccagaaacgctggtgaaagtaaaagatgctgaagatcagttgggtgcacgagtgggttacatcgaactggatctcaacagcggtaagatccttgagagttttcgccccgaagaacgttttccaatgatgagcacttttaaagttctgctatgtggcgcggtattatcccgtattgacgccgggcaagagcaactcggtcgccgcatacactattctcagaatgacttggttgagtactcaccagtcacagaaaagcatcttacggatggcatgacagtaagagaattatgcagtgctgccataaccatgagtgataacactgcggccaacttacttctgacaacgatcggaggaccgaaggagctaaccgcttttttgcacaacatgggggatcatgtaactcgccttgatcgttgggaaccggagctgaatgaagccataccaaacgacgagcgtgacaccacgatgcctgtagcaatggcaacaacgttgcgcaaactattaactggcgaactacttactctagcttcccggcaacaattaatagactggatggaggcggataaagttgcaggaccacttctgcgctcggcccttccggctggctggtttattgctgataaatctggagccggtgagcgtgggtctcgcggtatcattgcagcactggggccagatggtaagccctcccgtatcgtagttatctacacgacggggagtcaggcaactatggatgaacgaaatagacagatcgctgagataggtgcctcactgattaagcattggtaactgtcagaccaagtttactcatatatactttagattgatttaaaacttcatttttaatttaaaaggatctaggtgaagatcctttttgataatctcatgaccaaaatcccttaacgtgagttttcgttccactgagcgtcagaccccgtagaaaagatcaaaggatcttcttgagatcctttttttctgcgcgtaatctgctgcttgcaaacaaaaaaaccaccgctaccagcggtggtttgtttgccggatcaagagctaccaactctttttccgaaggtaactggcttcagcagagcgcagataccaaatactgtccttctagtgtagccgtagttaggccaccacttcaagaactctgtagcaccgcctacatacctcgctctgctaatcctgttaccagtggctgctgccagtggcgataagtcgtgtcttaccgggttggactcaagacgatagttaccggataaggcgcagcggtcgggctgaacggggggttcgtgcacacagcccagcttggagcgaacgacctacaccgaactgagatacctacagcgtgagctatgagaaagcgccacgcttcccgaagggagaaaggcggacaggtatccggtaagcggcagggtcggaacaggagagcgcacgagggagcttccagggggaaacgcctggtatctttatagtcctgtcgggtttcgccacctctgacttgagcgtcgatttttgtgatgctcgtcaggggggcggagcctatggaaaaacgccagcaacgcggcctttttacggttcctggccttttgctggccttttgctcacatgttctttcctgcgttatcccctgattctgtggataaccgtattaccgcctttgagtgagctgataccgctcgccgcagccgaacgaccgagcgcagcgagtcagtgagcgaggaagcggaagagcgcccaatacgcaaaccgcctctccccgcgcgttggccgattcattaatgcagctggcacgacaggtttcccgactggaaagcgggcagtgagcgcaacgcaattaatgtgagttagctcactcattaggcaccccaggctttacactttatgcttccggctcgtatgttgtgtggaattgtgagcggataacaatttcacacaggaaacagctatgaccatgattacgccaagcttgcatgcctgcaggtcgactcgacgtacgtcctcgaagagaagggttaataacacattttttaacatttttaacacaaattttagttatttaaaaatttattaaaaaatttaaaataagaagaggaactctttaaataaatctaacttacaaaatttatgatttttaataagttttcaccaataaaaaatgtcataaaaatatgttaaaaagtatattatcaatattctctttatgataaataaaaagaaaaaaaaaataaaagttaagtgaaaatgagattgaagtgactttaggtgtgtataaatatatcaaccccgccaacaatttatttaatccaaatatattgaagtatattattccatagcctttatttatttatatatttattatataaaagctttatttgttctaggttgttcatgaaatatttttttggttttatctccgttgtaagaaaatcatgtgctttgtgtcgccactcactattgcagctttttcatgcattggtcagattgacggttgattgtatttttgttttttatggttttgtgttatgacttaagtcttcatctctttatctcttcatcaggtttgatggttacctaatatggtccatgggtacatgcatggttaaattaggtggccaactttgttgtgaacgatagaattttttttatattaagtaaactatttttatattatgaaataataataaaaaaaatattttatcattattaacaaaatcatattagttaatttgttaactctataataaaagaaatactgtaacattcacattacatggtaacatctttccaccctttcatttgttttttgtttgatgactttttttcttgtttaaatttatttcccttcttttaaatttggaatacattatcatcatatataaactaaaatactaaaaacaggattacacaaatgataaataataacacaaatatttataaatctagctgcaatatatttaaactagctatatcgatattgtaaaataaaactagctgcattgatactgataaaaaaatatcatgtgctttctggactgatgatgcagtatacttttgacattgcctttattttatttttcagaaaagctttcttagttctgggttcttcattatttgtttcccatctccattgtgaattgaatcatttgcttcgtgtcacaaatacaatttagntaggtacatgcattggtcagattcacggtttattatgtcatgacttaagttcatggtagtacattacctgccacgcatgcattatattggttagatttgataggcaaatttggttgtcaacaatataaatataaataatgtttttatattacgaaataacagtgatcaaaacaaacagttttatctttattaacaagattttgtttttgtttgatgacgttttttaatgtttacgctttcccccttcttttgaatttagaacactttatcatcataaaatcaaatactaaaaaaattacatatttcataaataataacacaaatatttttaaaaaatctgaaataataatgaacaatattacatattatcacgaaaattcattaataaaaatattatataaataaaatgtaatagtagttatatgtaggaaaaaagtactgcacgcataatatatacaaaaagattaaaatgaactattataaataataacactaaattaatggtgaatcatatcaaaataatgaaaaagtaaataaaatttgtaattaacttctatatgtattacacacacaaataataaataatagtaaaaaaaattatgataaatatttaccatctcataagatatttaaaataatgataaaaatatagattattttttatgcaactagctagccaaaaagagaacacgggtatatataaaaagagtacctttaaattctactgtacttcctttattcctgacgtttttatatcaagtggacatacgtgaagattttaattatcagtctaaatatttcattagcacttaatacttttctgttttattcctatcctataagtagtcccgattctcccaacattgcttattcacacaactaactaagaaagtcttccatagccccccaagcggccgcaccatgagcgctctacttcgatcgtccctgcgttttaaacacatgtccgccgtcaaccgtctcacacaacagcttcgactgctgaccgcctccgcgcctctcagcgcagccaacaccgccggcaaggctcctttcaaggtcgccgttgttggttctggtaactggggaaccaccgtcgccaagattgtcgccgagaactgcactgctcaccccgagctctttgagcccgaggttcgagtctgggttcgagaagagaaggtcaacggcaagaacctgaccgacattttcaacgctgagcacgagaacgtgcgatacctccctaaaatcaaacttcctcacaacctgatcgccgagccggatctgctcaaggccgtcgagggtgccaacatcattgtcttcaacctgccccatcagttcctggctggtgtctgcaagcagctcaagggccacgtcaaccccaaggctagagccatctcctgcctcaagggtctagatgtcaccccccagggtgtttacctgctctccgacgttatcgagaacgagaccggtctccactgcggtgttctgtccggggctaacctcgccaccgagatcgctctggagaagtactccgagactaccgttgcttacaaccgacccaaggacttctttggcgagggtgatgtgaccaacgatgtgctcaaggctctgttccaccgaccctacttccatgtgcgatgcgttcaggacgtcgccggtgtctccatcggaggtgcccttaagaacgttgttgccctttgcgccggtttcgtcgagggcaagaactggggagacaacgccaaggccgcaattatgcgacgaggcatgcttgagatgatcaacttctccaagcgattctttcccgaaactgatattaacactcttacagtcgagtctgccggtgtggccgatctcatcacctcgtgcgctggaggccgaaacttcaaggtcggccgagcattcggaaaggagagcggctccggcaagaccatccaggacgtggagaaggagcttctcaacggccagtccgcccagggcgtcatcacatgcaacgaggtccacgagctgctcaagaacaagaacatgcagaaggacttccctctgttcgagtccacctggggcattatccacggtgagctcaagattgatgatctccccgagattctttaccacgccaactaggc

SEQ ID NO: 155 - DNA, 1122 bp, Glycine max
atgaatggcattgggaaactcaaatcgtcgagttctgaattggaccttcacattgaagattacctaccttctggatccagtgttcaacaagaacggcatggcaagctccgactgtgtgatttgctagacatttctcctagtctatctgaggcagcacgtgccattgtagatgatacattcacaaggtgcttcaagtcaaatcctccagaaccttggaactggaatgtttatttgtttcctttgtggtgctgtggagttgtggttcgatatttgattttgttccctattaggattctagtgttggcattaggatggattatatttctttcagccttcattccagtgcactccctcctgaaaggaaatgatgatttgaggaaaaagattgagaggtgtttggtggagatgatgtgcagtttctttgttgcatcatggactggggttgtcaagtaccatgggccaagacctagtatccgaccaaaacaggtttttgtggccaatcatacttccatgattgatttcattatcttagaacagatgactgcatttgctgttattatgcagaagcatcctggatgggttggattattgcagagcaccattttggagagtgtggggtgtatctggttcaatcgtacagaggcaaaggatcgagaaattgtggcaaggaaattgagggatcatgtcctgggagctaacaataaccctcttctcatatttcctgaaggaacttgtgtaaataatcactactctgtcatgttcaagaagggtgcatttgaacttggctgcacaatttgcccagttgcaatcaagtacaataaaattttcgtcgatgctttttggaatagtcgaaagcaatcattcaccactcatctcttgcaattaatgacatcttgggctgtagtttgtgatgtttggtacttggagccacaaaatttgaagccaggagagacacccattgaatttgcagagagagttagagacataatctcacatcgtgctgggcttaaaaaggttccttgggatggatatctgaagtattctcgccctagtcccaagcacagagaaggaaagcaacaaatattcgctgagtctgtgttgcggcgctttgaggaaaaataa

SEQ ID NO: 156 - protein, 373 aa, Glycine max
MNGIGKLKSSSSELDLHIEDYLPSGSSVQQERHGKLRLCDLLDISPSLSEAARAIVDDTFTRCFKSNPPEPWNWNVYLFPLWCCGVVVRYLILFPIRILVLALGWIIFLSAFIPVHSLLKGNDDLRKKIERCLVEMMCSFFVASWTGVVKYHGPRPSIRPKQVFVANHTSMIDFIILEQMTAFAVIMQKHPGWVGLLQSTILESVGCIWFNRTEAKDREIVARKLRDHVLGANNNPLLIFPEGTCVNNHYSVMFKKGAFELGCTICPVAIKYNKIFVDAFWNSRKQSFTTHLLQLMTSWAVVCDVWYLEPQNLKPGETPIEFAERVRDIISHRAGLKKVPWDGYLKYSRPSPKHREGKQQIFAESVLRRFEEK

SEQ ID NO: 157 - DNA, 30 bp, Artificial Sequence
  primer soy LPAAT-like fwd
caccatgaatggcattgggaaactcaaatc

SEQ ID NO: 158 - DNA, 29 bp, Artificial Sequence
  primer soy LPAAT-like rev
cattatttttcctcaaagcgccgcaacac

SEQ ID NO: 159 - DNA, 8654 bp, Artificial Sequence
  plasmid pKR561 soy LPAAT-like
ggccgctgaagtattgcttcttagttaacctttcctttctctctcagctatgtgaattcattttgctttcgtcacaatttatatagtgaaattggatctttggagttaacgccttcacaggattatcgtgttagaacaatgctttttcatgttctaattagtagtacattacaaatgtgcactctattcaataagcatcttttggcacgttaataaatcatgtgaaaaaaaaatactactatttcaaagaaagtgttgtaaaaagaaacggaaagagagctggcttcagttgttgagacttgtttgctagtaaaaatggtgtgaagagtgattcatggtgaggtggtttttcgtccctttctgtttgcatgaaaaacaaatggcaagagatgacgtaggattccttcccttaacgattatctgtttttaatttcaaatatacatataggaatttatgaattactaaggttgtaaaatatgctggtcatttatttatggctaaaatatttttttttctcgtaaatataaaaatatttaaaatttatttttatcatattttttatccttataaaattatgtgtacaacctatataaaaaaatatcatatttaatattgattatatgtttaatcaatataaaaaatcattatcatatatttagatttattcgaatatacatctaaacaaaaaataacatattttaattttatgaagaaaaaaaaatattttatcctttatttatttaagattaattaatagttatgtattgtggaaagacttttacacatgcaatagatatactgaatcaattagatgccaatgctgagttggaaatcacttgaggaggggaggagacttgccaatgcttttcagtttcatttaaatgatttagtggaggagatagagtagtgataaaggcatgccccaattttggagtgtatatatgagtggaaataagagagggatagagagaaaaaataaagagagtaaaaataattaatgtgaaatgatatgataaaaaaataaagaaagagataaagagaaaaatgaaatgagagatagatgaaatagagagtagatacatgtttgtttaggttttttttaggaaataacacatttttttctcatcacttattactcactgtcaatttcctctctttcaatcataatgatatgatttgtttaacaaaaatgtgaaaaaacatataaagtaaaatatttttataaattgataaataaaaatttacaaaatttatttcttattaaattgaatagaaaatgaaagaaaagaaaagaaaaagtatatataaaatgatatagctttaaaaagaataaatttttcatatcagtctttttttaataatttagaaatatttaagtatatagcaaaaatataatgtactttacatatgcataaataataatttgaaaatagaactaatagaatagagaaaaaagtaatataataattaactatatgaaaatttagaagggacaatatttttaattaagaatataaacaatatttcttttcatgtaatgagggacggatgtacggggccagtgttggagtcaaagccaaaatagtcacggggaaattaatgcactgcatgactattcgaaaaaattcactagccttacttagatgttagattaatagctagggggtgcagataattttgaaaggcatgaaaaacattaatttgtacattgcaagcttttgatgacaagctttgcaattgttcacactaccttatgccatttataaatagagtgattggcatatgaaggaaatcatgagagtcgaagcgaaaaacaaagcttgagagtgtaggaaaaatacagtttttttggtaaaaatacagtatttgaataggagcgaaaaatatcctttcaaaatgatccttttctttttttttttttttcttgttgttcttggtcagttattcaaaggaaaagggattgaaataaaaacttgcatgtgggatcgtacgtcgagtcgacggcgcgcccgatcatccggatatagttcctcctttcagcaaaaaacccctcaagacccgtttagaggccccaaggggttatgctagttattgctcagcggtggcagcagccaactcagcttcctttcgggctttgttagcagccggatcgatccaagctgtacctcactattcctttgccctcggacgagtgctggggcgtcggtttccactatcggcgagtacttctacacagccatcggtccagacggccgcgcttctgcgggcgatttgtgtacgcccgacagtcccggctccggatcggacgattgcgtcgcatcgaccctgcgcccaagctgcatcatcgaaattgccgtcaaccaagctctgatagagttggtcaagaccaatgcggagcatatacgcccggagccgcggcgatcctgcaagctccggatgcctccgctcgaagtagcgcgtctgctgctccatacaagccaaccacggcctccagaagaagatgttggcgacctcgtattgggaatccccgaacatcgcctcgctccagtcaatgaccgctgttatgcggccattgtccgtcaggacattgttggagccgaaatccgcgtgcacgaggtgccggacttcggggcagtcctcggcccaaagcatcagctcatcgagagcctgcgcgacggacgcactgacggtgtcgtccatcacagtttgccagtgatacacatggggatcagcaatcgcgcatatgaaatcacgccatgtagtgtattgaccgattccttgcggtccgaatgggccgaacccgctcgtctggctaagatcggccgcagcgatcgcatccatagcctccgcgaccggctgcagaacagcgggcagttcggtttcaggcaggtcttgcaacgtgacaccctgtgcacggcgggagatgcaataggtcaggctctcgctgaattccccaatgtcaagcacttccggaatcgggagcgcggccgatgcaaagtgccgataaacataacgatctttgtagaaaccatcggcgcagctatttacccgcaggacatatccacgccctcctacatcgaagctgaaagcacgagattcttcgccctccgagagctgcatcaggtcggagacgctgtcgaacttttcgatcagaaacttctcgacagacgtcgcggtgagttcaggcttttccatgggtatatctccttcttaaagttaaacaaaattatttctagagggaaaccgttgtggtctccctatagtgagtcgtattaatttcgcgggatcgagatcgatccaattccaatcccacaaaaatctgagcttaacagcacagttgctcctctcagagcagaatcgggtattcaacaccctcatatcaactactacgttgtgtataacggtccacatgccggtatatacgatgactggggttgtacaaaggcggcaacaaacggcgttcccggagttgcacacaagaaatttgccactattacagaggcaagagcagcagctgacgcgtacacaacaagtcagcaaacagacaggttgaacttcatccccaaaggagaagctcaactcaagcccaagagctttgctaaggccctaacaagcccaccaaagcaaaaagcccactggctcacgctaggaaccaaaaggcccagcagtgatccagccccaaaagagatctcctttgccccggagattacaatggacgatttcctctatctttacgatctaggaaggaagttcgaaggtgaaggtgacgacactatgttcaccactgataatgagaaggttagcctcttcaatttcagaaagaatgctgacccacagatggttagagaggcctacgcagcaggtctcatcaagacgatctacccgagtaacaatctccaggagatcaaataccttcccaagaaggttaaagatgcagtcaaaagattcaggactaattgcatcaagaacacagagaaagacatatttctcaagatcagaagtactattccagtatggacgattcaaggcttgcttcataaaccaaggcaagtaatagagattggagtctctaaaaaggtagttcctactgaatctaaggccatgcatggagtctaagattcaaatcgaggatctaacagaactcgccgtgaagactggcgaacagttcatacagagtcttttacgactcaatgacaagaagaaaatcttcgtcaacatggtggagcacgacactctggtctactccaaaaatgtcaaagatacagtctcagaagaccaaagggctattgagacttttcaacaaaggataatttcgggaaacctcctcggattccattgcccagctatctgtcacttcatcgaaaggacagtagaaaaggaaggtggctcctacaaatgccatcattgcgataaaggaaaggctatcattcaagatgcctctgccgacagtggtcccaaagatggacccccacccacgaggagcatcgtggaaaaagaagacgttccaaccacgtcttcaaagcaagtggattgatgtgacatctccactgacgtaagggatgacgcacaatcccactatccttcgcaagacccttcctctatataaggaagttcatttcatttggagaggacacgctcgagctcatttctctattacttcagccataacaaaagaactcttttctcttcttattaaaccatgaaaaagcctgaactcaccgcgacgtctgtcgagaagtttctgatcgaaaagttcgacagcgtctccgacctgatgcagctctcggagggcgaagaatctcgtgctttcagcttcgatgtaggagggcgtggatatgtcctgcgggtaaatagctgcgccgatggtttctacaaagatcgttatgtttatcggcactttgcatcggccgcgctcccgattccggaagtgcttgacattggggaattcagcgagagcctgacctattgcatctcccgccgtgcacagggtgtcacgttgcaagacctgcctgaaaccgaactgcccgctgttctgcagccggtcgcggaggccatggatgcgatcgctgcggccgatcttagccagacgagcgggttcggcccattcggaccgcaaggaatcggtcaatacactacatggcgtgatttcatatgcgcgattgctgatccccatgtgtatcactggcaaactgtgatggacgacaccgtcagtgcgtccgtcgcgcaggctctcgatgagctgatgctttgggccgaggactgccccgaagtccggcacctcgtgcacgcggatttcggctccaacaatgtcctgacggacaatggccgcataacagcggtcattgactggagcgaggcgatgttcggggattcccaatacgaggtcgccaacatcttcttctggaggccgtggttggcttgtatggagcagcagacgcgctacttcgagcggaggcatccggagcttgcaggatcgccgcggctccgggcgtatatgctccgcattggtcttgaccaactctatcagagcttggttgacggcaatttcgatgatgcagcttgggcgcagggtcgatgcgacgcaatcgtccgatccggagccgggactgtcgggcgtacacaaatcgcccgcagaagcgcggccgtctggaccgatggctgtgtagaagtactcgccgatagtggaaaccgacgccccagcactcgtccgagggcaaaggaatagtgaggtacctaaagaaggagtgcgtcgaagcagatcgttcaaacatttggcaataaagtttcttaagattgaatcctgttgccggtcttgcgatgattatcatataatttctgttgaattacgttaagcatgtaataattaacatgtaatgcatgacgttatttatgagatgggtttttatgattagagtcccgcaattatacatttaatacgcgatagaaaacaaaatatagcgcgcaaactaggataaattatcgcgcgcggtgtcatctatgttactagatcgatgtcgaatctgatcaacctgcattaatgaatcggccaacgcgcggggagaggcggtttgcgtattgggcgctcttccgcttcctcgctcactgactcgctgcgctcggtcgttcggctgcggcgagcggtatcagctcactcaaaggcggtaatacggttatccacagaatcaggggataacgcaggaaagaacatgtgagcaaaaggccagcaaaaggccaggaaccgtaaaaaggccgcgttgctggcgtttttccataggctccgcccccctgacgagcatcacaaaaatcgacgctcaagtcagaggtggcgaaacccgacaggactataaagataccaggcgtttccccctggaagctccctcgtgcgctctcctgttccgaccctgccgcttaccggatacctgtccgcctttctcccttcgggaagcgtggcgctttctcaatgctcacgctgtaggtatctcagttcggtgtaggtcgttcgctccaagctgggctgtgtgcacgaaccccccgttcagcccgaccgctgcgccttatccggtaactatcgtcttgagtccaacccggtaagacacgacttatcgccactggcagcagccactggtaacaggattagcagagcgaggtatgtaggcggtgctacagagttcttgaagtggtggcctaactacggctacactagaaggacagtatttggtatctgcgctctgctgaagccagttaccttcggaaaaagagttggtagctcttgatccggcaaacaaaccaccgctggtagcggtggtttttttgtttgcaagcagcagattacgcgcagaaaaaaaggatctcaagaagatcctttgatcttttctacggggtctgacgctcagtggaacgaaaactcacgttaagggattttggtcatgacattaacctataaaaataggcgtatcacgaggccctttcgtctcgcgcgtttcggtgatgacggtgaaaacctctgacacatgcagctcccggagacggtcacagcttgtctgtaagcggatgccgggagcagacaagcccgtcagggcgcgtcagcgggtgttggcgggtgtcggggctggcttaactatgcggcatcagagcagattgtactgagagtgcaccatatggacatattgtcgttagaacgcggctacaattaatacataaccttatgtatcatacacatacgatttaggtgacactatagaacggcgcgccaagcttggatcctctagacgtacggtaccatctgctaatattttaaatcacatgcaagagaggaggcatggttccattttctaccttcacattatttgagaaaaacgaacttgttctgtgttttatttttgcccttcacattagtacaacgtggaagactcatggttacacagaatcatacataagtacaatgcttgtccctaagaaaacaagcactcgttgtattgaacctttacggctcatgcggcccgcgcccacccttcattatttttcctcaaagcgccgcaacacagactcagcgaatatttgttgctttccttctctgtgcttgggactagggcgagaatacttcagatatccatcccaaggaacctttttaagcccagcacgatgtgagattatgtctctaactctctctgcaaattcaatgggtgtctctcctggcttcaaattttgtggctccaagtaccaaacatcacaaactacagcccaagatgtcattaattgcaagagatgagtggtgaatgattgctttcgactattccaaaaagcatcgacgaaaattttattgtacttgattgcaactgggcaaattgtgcagccaagttcaaatgcacccttcttgaacatgacagagtagtgattatttacacaagttccttcaggaaatatgagaagagggttattgttagctcccaggacatgatccctcaatttccttgccacaatttctcgatcctttgcctctgtacgattgaaccagatacaccccacactctccaaaatggtgctctgcaataatccaacccatccaggatgcttctgcataataacagcaaatgcagtcatctgttctaagataatgaaatcaatcatggaagtatgattggccacaaaaacctgttttggtcggatactaggtcttggcccatggtacttgacaaccccagtccatgatgcaacaaagaaactgcacatcatctccaccaaacacctctcaatctttttcctcaaatcatcatttcctttcaggagggagtgcactggaatgaaggctgaaagaaatataatccatcctaatgccaacactagaatcctaatagggaacaaaatcaaatatcgaaccacaactccacagcaccacaaaggaaacaaataaacattccagttccaaggttctggaggatttgacttgaagcaccttgtgaatgtatcatctacaatggcacgtgctgcctcagatagactaggagaaatgtctagcaaatcacacagtcggagcttgccatgccgttcttgttgaacactggatccagaaggtaggtaatcttcaatgtgaaggtccaattcagaactcgacgatttgagtttcccaatgccattcatggtgaagggggcggcc

SEQ ID NO: 160 - DNA, 1116 bp, Catalpa bignonioides
atgagcaagctaaaaacatccagctccgaattggatttggatcaccccaatatcgaagactatcttccatccggatccattcaagagcctcacggcaagctccgcctgcgtgatttgctcgatatttcaccaactctaactgaggcagctggtgccattgttgatgactccttcacgagatgcttcaagtcaaatccgccagaaccctggaactggaacatatatttgtttcctttgtggtgcttaggagttgttgtcagatatggtcttcttttccccttaagggtaatagtgttgacaataggatggattatatttctctcatgctatttccctgtgcatttcctgttaaaagggcatgacaaattgagaaaaaaattagagagaggtctagtggagttgatgtgcagtttttttgttgcatcatggactggggttgtcaagtaccatggtccgcggcccagcatgcggcctaagcaggtttttgtggctaatcacacatccatgattgatttcattgttttggaacaaatgactgcatttgcagtgattatgcagaagcatcctgggtgggtaggactattgcagagcactattttggagagtctaggatgtatctggttcaaccggtcagagtccaaggaccgtgaaattgttgcaaaaaagctaagagatcatgtccatggcgctgataataatcctcttcttatattcccggaaggaacatgtgtgaataaccactacactgtgatgtttaagaagggtgcatttgaacttggatgcactgtctgtccaatcgcaatcaagtataacaagatttttgtggatgccttctggaacagcagaaagcaatcctttacaatgcacttgttgcagcttatgacatcctgggctgttgtctgtgatgtttggtacctggagcctcaaaatctaaaacctggggaaacaccaattgaatttgctgagagggtgaggggcattatttctgttcgagcaggccttaagaaggtgccgtgggatggatatttgaagtactctcgccccagcccaaagcatcgtgagcgaaagcaacaaagcttcgcagagtcagttctccatcacctggaagagaaatag

SEQ ID NO: 161 - protein, 371 aa, Catalpa bignonioides
MSKLKTSSSELDLDHPNIEDYLPSGSIQEPHGKLRLRDLLDISPTLTEAAGAIVDDSFTRCFKSNPPEPWNWNIYLFPLWCLGVVVRYGLLFPLRVIVLTIGWIIFLSCYFPVHFLLKGHDKLRKKLERGLVELMCSFFVASWTGVVKYHGPRPSMRPKQVFVANHTSMIDFIVLEQMTAFAVIMQKHPGWVGLLQSTILESLGCIWFNRSESKDREIVAKKLRDHVHGADNNPLLIFPEGTCVNNHYTVMFKKGAFELGCTVCPIAIKYNKIFVDAFWNSRKQSFTMHLLQLMTSWAVVCDVWYLEPQNLKPGETPIEFAERVRGIISVRAGLKKVPWDGYLKYSRPSPKHRERKQQSFAESVLHHLEEK

SEQ ID NO: 162 - DNA, 28 bp, Artificial Sequence
  primer catalpa LPAAT-like fwd
caccatgagcaagctaaaaacatccagc

SEQ ID NO: 163 - DNA, 25 bp, Artificial Sequence
  primer catalpa LPAAT-like rev
cttcaatctatttctcttccaggtg

SEQ ID NO: 164 - DNA, 8653 bp, Artificial Sequence
  plasmid pKR561 catalpa soy LPAAT-like
ggccgctgaagtattgcttcttagttaacctttcctttctctctcagctatgtgaattcattttgctttcgtcacaatttatatagtgaaattggatctttggagttaacgccttcacaggattatcgtgttagaacaatgctttttcatgttctaattagtagtacattacaaatgtgcactctattcaataagcatcttttggcacgttaataaatcatgtgaaaaaaaaatactactatttcaaagaaagtgttgtaaaaagaaacggaaagagagctggcttcagttgttgagacttgtttgctagtaaaaatggtgtgaagagtgattcatggtgaggtggtttttcgtccctttctgtttgcatgaaaaacaaatggcaagagatgacgtaggattccttcccttaacgattatctgtttttaatttcaaatatacatataggaatttatgaattactaaggttgtaaaatatgctggtcatttatttatggctaaaatatttttttttctcgtaaatataaaaatatttaaaatttatttttatcatattttttatccttataaaattatgtgtacaacctatataaaaaaatatcatatttaatattgattatatgtttaatcaatataaaaaatcattatcatatatttagatttattcgaatatacatctaaacaaaaaataacatattttaattttatgaagaaaaaaaaatattttatcctttatttatttaagattaattaatagttatgtattgtggaaagacttttacacatgcaatagatatactgaatcaattagatgccaatgctgagttggaaatcacttgaggaggggaggagacttgccaatgcttttcagtttcatttaaatgatttagtggaggagatagagtagtgataaaggcatgccccaattttggagtgtatatatgagtggaaataagagagggatagagagaaaaaataaagagagtaaaaataattaatgtgaaatgatatgataaaaaaataaagaaagagataaagagaaaaatgaaatgagagatagatgaaatagagagtagatacatgtttgtttaggttttttttaggaaataacacatttttttctcatcacttattactcactgtcaatttcctctctttcaatcataatgatatgatttgtttaacaaaaatgtgaaaaaacatataaagtaaaatatttttataaattgataaataaaaatttacaaaatttatttcttattaaattgaatagaaaatgaaagaaaagaaaagaaaaagtatatataaaatgatatagctttaaaaagaataaatttttcatatcagtctttttttaataatttagaaatatttaagtatatagcaaaaatataatgtactttacatatgcataaataataatttgaaaatagaactaatagaatagagaaaaaagtaatataataattaactatatgaaaatttagaagggacaatatttttaattaagaatataaacaatatttcttttcatgtaatgagggacggatgtacggggccagtgttggagtcaaagccaaaatagtcacggggaaattaatgcactgcatgactattcgaaaaaattcactagccttacttagatgttagattaatagctagggggtgcagataattttgaaaggcatgaaaaacattaatttgtacattgcaagcttttgatgacaagctttgcaattgttcacactaccttatgccatttataaatagagtgattggcatatgaaggaaatcatgagagtcgaagcgaaaaacaaagcttgagagtgtaggaaaaatacagtttttttggtaaaaatacagtatttgaataggagcgaaaaatatcctttcaaaatgatccttttctttttttttttttttcttgttgttcttggtcagttattcaaaggaaaagggattgaaataaaaacttgcatgtgggatcgtacgtcgagtcgacggcgcgcccgatcatccggatatagttcctcctttcagcaaaaaacccctcaagacccgtttagaggccccaaggggttatgctagttattgctcagcggtggcagcagccaactcagcttcctttcgggctttgttagcagccggatcgatccaagctgtacctcactattcctttgccctcggacgagtgctggggcgtcggtttccactatcggcgagtacttctacacagccatcggtccagacggccgcgcttctgcgggcgatttgtgtacgcccgacagtcccggctccggatcggacgattgcgtcgcatcgaccctgcgcccaagctgcatcatcgaaattgccgtcaaccaagctctgatagagttggtcaagaccaatgcggagcatatacgcccggagccgcggcgatcctgcaagctccggatgcctccgctcgaagtagcgcgtctgctgctccatacaagccaaccacggcctccagaagaagatgttggcgacctcgtattgggaatccccgaacatcgcctcgctccagtcaatgaccgctgttatgcggccattgtccgtcaggacattgttggagccgaaatccgcgtgcacgaggtgccggacttcggggcagtcctcggcccaaagcatcagctcatcgagagcctgcgcgacggacgcactgacggtgtcgtccatcacagtttgccagtgatacacatggggatcagcaatcgcgcatatgaaatcacgccatgtagtgtattgaccgattccttgcggtccgaatgggccgaacccgctcgtctggctaagatcggccgcagcgatcgcatccatagcctccgcgaccggctgcagaacagcgggcagttcggtttcaggcaggtcttgcaacgtgacaccctgtgcacggcgggagatgcaataggtcaggctctcgctgaattccccaatgtcaagcacttccggaatcgggagcgcggccgatgcaaagtgccgataaacataacgatctttgtagaaaccatcggcgcagctatttacccgcaggacatatccacgccctcctacatcgaagctgaaagcacgagattcttcgccctccgagagctgcatcaggtcggagacgctgtcgaacttttcgatcagaaacttctcgacagacgtcgcggtgagttcaggcttttccatgggtatatctccttcttaaagttaaacaaaattatttctagagggaaaccgttgtggtctccctatagtgagtcgtattaatttcgcgggatcgagatcgatccaattccaatcccacaaaaatctgagcttaacagcacagttgctcctctcagagcagaatcgggtattcaacaccctcatatcaactactacgttgtgtataacggtccacatgccggtatatacgatgactggggttgtacaaaggcggcaacaaacggcgttcccggagttgcacacaagaaatttgccactattacagaggcaagagcagcagctgacgcgtacacaacaagtcagcaaacagacaggttgaacttcatccccaaaggagaagctcaactcaagcccaagagctttgctaaggccctaacaagcccaccaaagcaaaaagcccactggctcacgctaggaaccaaaaggcccagcagtgatccagccccaaaagagatctcctttgccccggagattacaatggacgatttcctctatctttacgatctaggaaggaagttcgaaggtgaaggtgacgacactatgttcaccactgataatgagaaggttagcctcttcaatttcagaaagaatgctgacccacagatggttagagaggcctacgcagcaggtctcatcaagacgatctacccgagtaacaatctccaggagatcaaataccttcccaagaaggttaaagatgcagtcaaaagattcaggactaattgcatcaagaacacagagaaagacatatttctcaagatcagaagtactattccagtatggacgattcaaggcttgcttcataaaccaaggcaagtaatagagattggagtctctaaaaaggtagttcctactgaatctaaggccatgcatggagtctaagattcaaatcgaggatctaacagaactcgccgtgaagactggcgaacagttcatacagagtcttttacgactcaatgacaagaagaaaatcttcgtcaacatggtggagcacgacactctggtctactccaaaaatgtcaaagatacagtctcagaagaccaaagggctattgagacttttcaacaaaggataatttcgggaaacctcctcggattccattgcccagctatctgtcacttcatcgaaaggacagtagaaaaggaaggtggctcctacaaatgccatcattgcgataaaggaaaggctatcattcaagatgcctctgccgacagtggtcccaaagatggacccccacccacgaggagcatcgtggaaaaagaagacgttccaaccacgtcttcaaagcaagtggattgatgtgacatctccactgacgtaagggatgacgcacaatcccactatccttcgcaagacccttcctctatataaggaagttcatttcatttggagaggacacgctcgagctcatttctctattacttcagccataacaaaagaactcttttctcttcttattaaaccatgaaaaagcctgaactcaccgcgacgtctgtcgagaagtttctgatcgaaaagttcgacagcgtctccgacctgatgcagctctcggagggcgaagaatctcgtgctttcagcttcgatgtaggagggcgtggatatgtcctgcgggtaaatagctgcgccgatggtttctacaaagatcgttatgtttatcggcactttgcatcggccgcgctcccgattccggaagtgcttgacattggggaattcagcgagagcctgacctattgcatctcccgccgtgcacagggtgtcacgttgcaagacctgcctgaaaccgaactgcccgctgttctgcagccggtcgcggaggccatggatgcgatcgctgcggccgatcttagccagacgagcgggttcggcccattcggaccgcaaggaatcggtcaatacactacatggcgtgatttcatatgcgcgattgctgatccccatgtgtatcactggcaaactgtgatggacgacaccgtcagtgcgtccgtcgcgcaggctctcgatgagctgatgctttgggccgaggactgccccgaagtccggcacctcgtgcacgcggatttcggctccaacaatgtcctgacggacaatggccgcataacagcggtcattgactggagcgaggcgatgttcggggattcccaatacgaggtcgccaacatcttcttctggaggccgtggttggcttgtatggagcagcagacgcgctacttcgagcggaggcatccggagcttgcaggatcgccgcggctccgggcgtatatgctccgcattggtcttgaccaactctatcagagcttggttgacggcaatttcgatgatgcagcttgggcgcagggtcgatgcgacgcaatcgtccgatccggagccgggactgtcgggcgtacacaaatcgcccgcagaagcgcggccgtctggaccgatggctgtgtagaagtactcgccgatagtggaaaccgacgccccagcactcgtccgagggcaaaggaatagtgaggtacctaaagaaggagtgcgtcgaagcagatcgttcaaacatttggcaataaagtttcttaagattgaatcctgttgccggtcttgcgatgattatcatataatttctgttgaattacgttaagcatgtaataattaacatgtaatgcatgacgttatttatgagatgggtttttatgattagagtcccgcaattatacatttaatacgcgatagaaaacaaaatatagcgcgcaaactaggataaattatcgcgcgcggtgtcatctatgttactagatcgatgtcgaatctgatcaacctgcattaatgaatcggccaacgcgcggggagaggcggtttgcgtattgggcgctcttccgcttcctcgctcactgactcgctgcgctcggtcgttcggctgcggcgagcggtatcagctcactcaaaggcggtaatacggttatccacagaatcaggggataacgcaggaaagaacatgtgagcaaaaggccagcaaaaggccaggaaccgtaaaaaggccgcgttgctggcgtttttccataggctccgcccccctgacgagcatcacaaaaatcgacgctcaagtcagaggtggcgaaacccgacaggactataaagataccaggcgtttccccctggaagctccctcgtgcgctctcctgttccgaccctgccgcttaccggatacctgtccgcctttctcccttcgggaagcgtggcgctttctcaatgctcacgctgtaggtatctcagttcggtgtaggtcgttcgctccaagctgggctgtgtgcacgaaccccccgttcagcccgaccgctgcgccttatccggtaactatcgtcttgagtccaacccggtaagacacgacttatcgccactggcagcagccactggtaacaggattagcagagcgaggtatgtaggcggtgctacagagttcttgaagtggtggcctaactacggctacactagaaggacagtatttggtatctgcgctctgctgaagccagttaccttcggaaaaagagttggtagctcttgatccggcaaacaaaccaccgctggtagcggtggtttttttgtttgcaagcagcagattacgcgcagaaaaaaaggatctcaagaagatcctttgatcttttctacggggtctgacgctcagtggaacgaaaactcacgttaagggattttggtcatgacattaacctataaaaataggcgtatcacgaggccctttcgtctcgcgcgtttcggtgatgacggtgaaaacctctgacacatgcagctcccggagacggtcacagcttgtctgtaagcggatgccgggagcagacaagcccgtcagggcgcgtcagcgggtgttggcgggtgtcggggctggcttaactatgcggcatcagagcagattgtactgagagtgcaccatatggacatattgtcgttagaacgcggctacaattaatacataaccttatgtatcatacacatacgatttaggtgacactatagaacggcgcgccaagcttggatcctctagacgtacggtaccatctgctaatattttaaatcacatgcaagagaggaggcatggttccattttctaccttcacattatttgagaaaaacgaacttgttctgtgttttatttttgcccttcacattagtacaacgtggaagactcatggttacacagaatcatacataagtacaatgcttgtccctaagaaaacaagcactcgttgtattgaacctttacggctcatgcggcccgcgcccacccttcttcaatctatttctcttccaggtgatggagaactgactctgcgaagctttgttgctttcgctcacgatgctttgggctggggcgagagtacttcaaatatccatcccacggcaccttcttaaggcctgctcgaacagaaataatgcccctcaccctctcagcaaattcaattggtgtttccccaggttttagattttgaggctccaggtaccaaacatcacagacaacagcccaggatgtcataagctgcaacaagtgcattgtaaaggattgctttctgctgttccagaaggcatccacaaaaatcttgttatacttgattgcgattggacagacagtgcatccaagttcaaatgcacccttcttaaacatcacagtgtagtggttattcacacatgttccttccgggaatataagaagaggattattatcagcgccatggacatgatctcttagcttttttgcaacaatttcacggtccttggactctgaccggttgaaccagatacatcctagactctccaaaatagtgctctgcaatagtcctacccacccaggatgcttctgcataatcactgcaaatgcagtcatttgttccaaaacaatgaaatcaatcatggatgtgtgattagccacaaaaacctgcttaggccgcatgctgggccgcggaccatggtacttgacaaccccagtccatgatgcaacaaaaaaactgcacatcaactccactagacctctctctaatttttttctcaatttgtcatgcccttttaacaggaaatgcacagggaaatagcatgagagaaatataatccatcctattgtcaacactattacccttaaggggaaaagaagaccatatctgacaacaactcctaagcaccacaaaggaaacaaatatatgttccagttccagggttctggcggatttgacttgaagcatctcgtgaaggagtcatcaacaatggcaccagctgcctcagttagagttggtgaaatatcgagcaaatcacgcaggcggagcttgccgtgaggctcttgaatggatccggatggaagatagtcttcgatattggggtgatccaaatccaattcggagctggatgtttttagcttgctcatggtgaagggggcggcc

SEQ ID NO: 165 - DNA, 4906 bp, Artificial Sequence
  plasmid pKR268
ggccgcatgagccgtaaaggttcaatacaacgagtgcttgttttcttagggacaagcattgtacttatgtatgattctgtgtaaccatgagtcttccacgttgtactaatgtgaagggcaaaaataaaacacagaacaagttcgtttttctcaaataatgtgaaggtagaaaatggaaccatgcctcctctcttgcatgtgatttaaaatattagcagatggtaccgtacgtgggcggatcccccgggctgcaggaattcactggccgtcgttttacaacgtcgtgactgggaaaaccctggcgttacccaacttaatcgccttgcagcacatccccctttcgccagctggcgtaatagcgaagaggcccgcaccgatcgcccttcccaacagttgcgcagcctgaatggcgaatggcgcctgatgcggtattttctccttacgcatctgtgcggtatttcacaccgcatatggtgcactctcagtacaatctgctctgatgccgcatagttaagccagccccgacacccgccaacacccgctgacgcgccctgacgggcttgtctgctcccggcatccgcttacagacaagctgtgaccgtctccgggagctgcatgtgtcagaggttttcaccgtcatcaccgaaacgcgcgagacgaaagggcctcgtgatacgcctatttttataggttaatgtcatgataataatggtttcttagacgtcaggtggcacttttcggggaaatgtgcgcggaacccctatttgtttatttttctaaatacattcaaatatgtatccgctcatgagacaataaccctgataaatgcttcaataatattgaaaaaggaagagtatgagtattcaacatttccgtgtcgcccttattcccttttttgcggcattttgccttcctgtttttgctcacccagaaacgctggtgaaagtaaaagatgctgaagatcagttgggtgcacgagtgggttacatcgaactggatctcaacagcggtaagatccttgagagttttcgccccgaagaacgttttccaatgatgagcacttttaaagttctgctatgtggcgcggtattatcccgtattgacgccgggcaagagcaactcggtcgccgcatacactattctcagaatgacttggttgagtactcaccagtcacagaaaagcatcttacggatggcatgacagtaagagaattatgcagtgctgccataaccatgagtgataacactgcggccaacttacttctgacaacgatcggaggaccgaaggagctaaccgcttttttgcacaacatgggggatcatgtaactcgccttgatcgttgggaaccggagctgaatgaagccataccaaacgacgagcgtgacaccacgatgcctgtagcaatggcaacaacgttgcgcaaactattaactggcgaactacttactctagcttcccggcaacaattaatagactggatggaggcggataaagttgcaggaccacttctgcgctcggcccttccggctggctggtttattgctgataaatctggagccggtgagcgtgggtctcgcggtatcattgcagcactggggccagatggtaagccctcccgtatcgtagttatctacacgacggggagtcaggcaactatggatgaacgaaatagacagatcgctgagataggtgcctcactgattaagcattggtaactgtcagaccaagtttactcatatatactttagattgatttaaaacttcatttttaatttaaaaggatctaggtgaagatcctttttgataatctcatgaccaaaatcccttaacgtgagttttcgttccactgagcgtcagaccccgtagaaaagatcaaaggatcttcttgagatcctttttttctgcgcgtaatctgctgcttgcaaacaaaaaaaccaccgctaccagcggtggtttgtttgccggatcaagagctaccaactctttttccgaaggtaactggcttcagcagagcgcagataccaaatactgtccttctagtgtagccgtagttaggccaccacttcaagaactctgtagcaccgcctacatacctcgctctgctaatcctgttaccagtggctgctgccagtggcgataagtcgtgtcttaccgggttggactcaagacgatagttaccggataaggcgcagcggtcgggctgaacggggggttcgtgcacacagcccagcttggagcgaacgacctacaccgaactgagatacctacagcgtgagctatgagaaagcgccacgcttcccgaagggagaaaggcggacaggtatccggtaagcggcagggtcggaacaggagagcgcacgagggagcttccagggggaaacgcctggtatctttatagtcctgtcgggtttcgccacctctgacttgagcgtcgatttttgtgatgctcgtcaggggggcggagcctatggaaaaacgccagcaacgcggcctttttacggttcctggccttttgctggccttttgctcacatgttctttcctgcgttatcccctgattctgtggataaccgtattaccgcctttgagtgagctgataccgctcgccgcagccgaacgaccgagcgcagcgagtcagtgagcgaggaagcggaagagcgcccaatacgcaaaccgcctctccccgcgcgttggccgattcattaatgcagctggcacgacaggtttcccgactggaaagcgggcagtgagcgcaacgcaattaatgtgagttagctcactcattaggcaccccaggctttacactttatgcttccggctcgtatgttgtgtggaattgtgagcggataacaatttcacacaggaaacagctatgaccatgattacgccaagcttgcatgcctgcaggtcgactcgacgtacgatcccacatgcaagtttttatttcaatcccttttcctttgaataactgaccaagaacaacaagaaaaaaaaaaaaaaagaaaaggatcattttgaaaggatatttttcgctcctattcaaatactgtatttttaccaaaaaaactgtatttttcctacactctcaagctttgtttttcgcttcgactctcatgatttccttcatatgccaatcactctatttataaatggcataaggtagtgtgaacaattgcaaagcttgtcatcaaaagcttgcaatgtacaaattaatgtttttcatgcctttcaaaattatctgcaccccctagctattaatctaacatctaagtaaggctagtgaattttttcgaatagtcatgcagtgcattaatttccccgtgactattttggctttgactccaacactggccccgtacatccgtccctcattacatgaaaagaaatattgtttatattcttaattaaaaatattgtcccttctaaattttcatatagttaattattatattacttttttctctattctattagttctattttcaaattattatttatgcatatgtaaagtacattatatttttgctatatacttaaatatttctaaattattaaaaaaagactgatatgaaaaatttattctttttaaagctatatcattttatatatactttttcttttcttttctttcattttctattcaatttaataagaaataaattttgtaaatttttatttatcaatttataaaaatattttactttatatgttttttcacatttttgttaaacaaatcatatcattatgattgaaagagaggaaattgacagtgagtaataagtgatgagaaaaaaatgtgttatttcctaaaaaaaacctaaacaaacatgtatctactctctatttcatctatctctcatttcatttttctctttatctctttctttatttttttatcatatcatttcacattaattatttttactctctttattttttctctctatccctctcttatttccactcatatatacactccaaaattggggcatgcctttatcactactctatctcctccactaaatcatttaaatgaaactgaaaagcattggcaagtctcctcccctcctcaagtgatttccaactcagcattggcatctaattgattcagtatatctattgcatgtgtaaaagtctttccacaatacataactattaattaatcttaaataaataaaggataaaatatttttttttcttcataaaattaaaatatgttattttttgtttagatgtatattcgaataaatctaaatatatgataatgattttttatattgattaaacatataatcaatattaaatatgatatttttttatataggttgtacacataattttataaggataaaaaatatgataaaaataaattttaaatatttttatatttacgagaaaaaaaaatattttagccataaataaatgaccagcatattttacaaccttagtaattcataaattcctatatgtatatttgaaattaaaaacagataatcgttaagggaaggaatcctacgtcatctcttgccatttgtttttcatgcaaacagaaagggacgaaaaaccacctcaccatgaatcactcttcacaccatttttactagcaaacaagtctcaacaactgaagccagctctctttccgtttctttttacaacactttctttgaaatagtagtatttttttttcacatgatttattaacgtgccaaaagatgcttattgaatagagtgcacatttgtaatgtactactaattagaacatgaaaaagcattgttctaacacgataatcctgtgaaggcgttaactccaaagatccaatttcactatataaattgtgacgaaagcaaaatgaattcacatagctgagagagaaaggaaaggttaactaagaagcaatacttcagc

SEQ ID NO: 166 - DNA, 7096 bp, Artificial Sequence
  plasmid pKR145
gatcctctagacgtacgtgaaggttaaacatggtgaatatgttaccactagctgggatgcccattagatcaaaactgtaaaattctcccgtttcccttctattcacatgtgagccccctcccttttctttctttctcaattttgattgagttaaagtcaccagcaatgcatcactcaccctccaaaaaatttcttgtacaacttctcggactatcccaaagctccttttcctgagatggatggtcctgtctcttgcccttgatgtcttccttgttcgattttggcttcctctaatgtctttcttgctaggaatcaccacctcactcatctatgttgtcgtagcttctgaaagtctcatacatatccttagtgttgcactcatcttgtattgaagtgaaaaagaatgttgttctcctatccaaatctccattgaatctctttctcccaatgttgtcccatcggttggtcctcctctccaaccaattgtaaggtgtttaacataaacatggtacaattaagatttttcatttcattaagaaaagattgagatttgtggttctaaagtttcaattagagtttgatgatattgaaacaaccgtagaacacattaagtattactaacttatacatagagcattggaatttcaccttttatttattctgtttccgccaaaggtacatgactcaagttattttacacaagtaacaaaggcatctaagcctaagtattcttattcagacttttcattattactttcattgatttggtgcgaaatgcggccgcagttggatagaatatatgtttgtgacgcgaagaaccttaatctggcatagggatttatagtgaaacataggaaagtataggagggacacatcggctccaagaagatacatgagttgctgaccattcgacattcttcatcttgcatggttatggaagccttgtgtgttacacctcataaaatcaaatgtctcattacagcagaggtggcttcaagtgagagttgagtaattagatagctagctgaaatcggtggtgttggggaccatgtatagtatataattgatttctctttttacatatgtacgtgagtttgatcattactgtcttgtaatatctagatatatgaacctgattcactttcaagctagttaatgtctgtatattgtatgttggataggatttagttcatggtctgtacaaatttttaaagtttaatggtaaagcacaattttgtgtagttgaatataggtggacgataacaacttcaaattaaagtgcttgaattacaatttacaatatagtcatatatgttatataaaatcacacaaattatttggatcaataacaattgatttgctttaaatttgatgatgattgtttaagttctttaatacttatttaagaaaagttagccatcacattcgtaatcataacccttacttgactattttctttttaaattgatttgggaccgcttccgtaatcataatccttaattgatcattactttttaaactgatttgcaatgctagtgattacgaacttgaagtcaataaaataaaataaaatccatactatatattatgtgaacaaatcttgaatgaaaagtaaactagactaccattaagaaggaattactcgtcataatatttgtattgggacatttttgctcttatctaactagttccaaagttattgtgtttacatatcatcgtacaacgctcagacacttagttgaattaaggagagtcaaaacctatttgttaatatgagttatttttctttaaaactttgacctggagatcaaagataagaagggacgtacgtcgagtcgacggcgcgcccgatcatccggatatagttcctcctttcagcaaaaaacccctcaagacccgtttagaggccccaaggggttatgctagttattgctcagcggtggcagcagccaactcagcttcctttcgggctttgttagcagccggatcgatccaagctgtacctcactattcctttgccctcggacgagtgctggggcgtcggtttccactatcggcgagtacttctacacagccatcggtccagacggccgcgcttctgcgggcgatttgtgtacgcccgacagtcccggctccggatcggacgattgcgtcgcatcgaccctgcgcccaagctgcatcatcgaaattgccgtcaaccaagctctgatagagttggtcaagaccaatgcggagcatatacgcccggagccgcggcgatcctgcaagctccggatgcctccgctcgaagtagcgcgtctgctgctccatacaagccaaccacggcctccagaagaagatgttggcgacctcgtattgggaatccccgaacatcgcctcgctccagtcaatgaccgctgttatgcggccattgtccgtcaggacattgttggagccgaaatccgcgtgcacgaggtgccggacttcggggcagtcctcggcccaaagcatcagctcatcgagagcctgcgcgacggacgcactgacggtgtcgtccatcacagtttgccagtgatacacatggggatcagcaatcgcgcatatgaaatcacgccatgtagtgtattgaccgattccttgcggtccgaatgggccgaacccgctcgtctggctaagatcggccgcagcgatcgcatccatagcctccgcgaccggctgcagaacagcgggcagttcggtttcaggcaggtcttgcaacgtgacaccctgtgcacggcgggagatgcaataggtcaggctctcgctgaattccccaatgtcaagcacttccggaatcgggagcgcggccgatgcaaagtgccgataaacataacgatctttgtagaaaccatcggcgcagctatttacccgcaggacatatccacgccctcctacatcgaagctgaaagcacgagattcttcgccctccgagagctgcatcaggtcggagacgctgtcgaacttttcgatcagaaacttctcgacagacgtcgcggtgagttcaggcttttccatgggtatatctccttcttaaagttaaacaaaattatttctagagggaaaccgttgtggtctccctatagtgagtcgtattaatttcgcgggatcgagatcgatccaattccaatcccacaaaaatctgagcttaacagcacagttgctcctctcagagcagaatcgggtattcaacaccctcatatcaactactacgttgtgtataacggtccacatgccggtatatacgatgactggggttgtacaaaggcggcaacaaacggcgttcccggagttgcacacaagaaatttgccactattacagaggcaagagcagcagctgacgcgtacacaacaagtcagcaaacagacaggttgaacttcatccccaaaggagaagctcaactcaagcccaagagctttgctaaggccctaacaagcccaccaaagcaaaaagcccactggctcacgctaggaaccaaaaggcccagcagtgatccagccccaaaagagatctcctttgccccggagattacaatggacgatttcctctatctttacgatctaggaaggaagttcgaaggtgaaggtgacgacactatgttcaccactgataatgagaaggttagcctcttcaatttcagaaagaatgctgacccacagatggttagagaggcctacgcagcaggtctcatcaagacgatctacccgagtaacaatctccaggagatcaaataccttcccaagaaggttaaagatgcagtcaaaagattcaggactaattgcatcaagaacacagagaaagacatatttctcaagatcagaagtactattccagtatggacgattcaaggcttgcttcataaaccaaggcaagtaatagagattggagtctctaaaaaggtagttcctactgaatctaaggccatgcatggagtctaagattcaaatcgaggatctaacagaactcgccgtgaagactggcgaacagttcatacagagtcttttacgactcaatgacaagaagaaaatcttcgtcaacatggtggagcacgacactctggtctactccaaaaatgtcaaagatacagtctcagaagaccaaagggctattgagacttttcaacaaaggataatttcgggaaacctcctcggattccattgcccagctatctgtcacttcatcgaaaggacagtagaaaaggaaggtggctcctacaaatgccatcattgcgataaaggaaaggctatcattcaagatgcctctgccgacagtggtcccaaagatggacccccacccacgaggagcatcgtggaaaaagaagacgttccaaccacgtcttcaaagcaagtggattgatgtgacatctccactgacgtaagggatgacgcacaatcccactatccttcgcaagacccttcctctatataaggaagttcatttcatttggagaggacacgctcgagctcatttctctattacttcagccataacaaaagaactcttttctcttcttattaaaccatgaaaaagcctgaactcaccgcgacgtctgtcgagaagtttctgatcgaaaagttcgacagcgtctccgacctgatgcagctctcggagggcgaagaatctcgtgctttcagcttcgatgtaggagggcgtggatatgtcctgcgggtaaatagctgcgccgatggtttctacaaagatcgttatgtttatcggcactttgcatcggccgcgctcccgattccggaagtgcttgacattggggaattcagcgagagcctgacctattgcatctcccgccgtgcacagggtgtcacgttgcaagacctgcctgaaaccgaactgcccgctgttctgcagccggtcgcggaggccatggatgcgatcgctgcggccgatcttagccagacgagcgggttcggcccattcggaccgcaaggaatcggtcaatacactacatggcgtgatttcatatgcgcgattgctgatccccatgtgtatcactggcaaactgtgatggacgacaccgtcagtgcgtccgtcgcgcaggctctcgatgagctgatgctttgggccgaggactgccccgaagtccggcacctcgtgcacgcggatttcggctccaacaatgtcctgacggacaatggccgcataacagcggtcattgactggagcgaggcgatgttcggggattcccaatacgaggtcgccaacatcttcttctggaggccgtggttggcttgtatggagcagcagacgcgctacttcgagcggaggcatccggagcttgcaggatcgccgcggctccgggcgtatatgctccgcattggtcttgaccaactctatcagagcttggttgacggcaatttcgatgatgcagcttgggcgcagggtcgatgcgacgcaatcgtccgatccggagccgggactgtcgggcgtacacaaatcgcccgcagaagcgcggccgtctggaccgatggctgtgtagaagtactcgccgatagtggaaaccgacgccccagcactcgtccgagggcaaaggaatagtgaggtacctaaagaaggagtgcgtcgaagcagatcgttcaaacatttggcaataaagtttcttaagattgaatcctgttgccggtcttgcgatgattatcatataatttctgttgaattacgttaagcatgtaataattaacatgtaatgcatgacgttatttatgagatgggtttttatgattagagtcccgcaattatacatttaatacgcgatagaaaacaaaatatagcgcgcaaactaggataaattatcgcgcgcggtgtcatctatgttactagatcgatgtcgaatctgatcaacctgcattaatgaatcggccaacgcgcggggagaggcggtttgcgtattgggcgctcttccgcttcctcgctcactgactcgctgcgctcggtcgttcggctgcggcgagcggtatcagctcactcaaaggcggtaatacggttatccacagaatcaggggataacgcaggaaagaacatgtgagcaaaaggccagcaaaaggccaggaaccgtaaaaaggccgcgttgctggcgtttttccataggctccgcccccctgacgagcatcacaaaaatcgacgctcaagtcagaggtggcgaaacccgacaggactataaagataccaggcgtttccccctggaagctccctcgtgcgctctcctgttccgaccctgccgcttaccggatacctgtccgcctttctcccttcgggaagcgtggcgctttctcaatgctcacgctgtaggtatctcagttcggtgtaggtcgttcgctccaagctgggctgtgtgcacgaaccccccgttcagcccgaccgctgcgccttatccggtaactatcgtcttgagtccaacccggtaagacacgacttatcgccactggcagcagccactggtaacaggattagcagagcgaggtatgtaggcggtgctacagagttcttgaagtggtggcctaactacggctacactagaaggacagtatttggtatctgcgctctgctgaagccagttaccttcggaaaaagagttggtagctcttgatccggcaaacaaaccaccgctggtagcggtggtttttttgtttgcaagcagcagattacgcgcagaaaaaaaggatctcaagaagatcctttgatcttttctacggggtctgacgctcagtggaacgaaaactcacgttaagggattttggtcatgacattaacctataaaaataggcgtatcacgaggccctttcgtctcgcgcgtttcggtgatgacggtgaaaacctctgacacatgcagctcccggagacggtcacagcttgtctgtaagcggatgccgggagcagacaagcccgtcagggcgcgtcagcgggtgttggcgggtgtcggggctggcttaactatgcggcatcagagcagattgtactgagagtgcaccatatggacatattgtcgttagaacgcggctacaattaatacataaccttatgtatcatacacatacgatttaggtgacactatagaacggcgcgccaagcttg

SEQ ID NO: 167 - DNA, 7497 bp, Artificial Sequence
  plasmid pKR561
gtacgtcgagtcgacggcgcgcccgatcatccggatatagttcctcctttcagcaaaaaacccctcaagacccgtttagaggccccaaggggttatgctagttattgctcagcggtggcagcagccaactcagcttcctttcgggctttgttagcagccggatcgatccaagctgtacctcactattcctttgccctcggacgagtgctggggcgtcggtttccactatcggcgagtacttctacacagccatcggtccagacggccgcgcttctgcgggcgatttgtgtacgcccgacagtcccggctccggatcggacgattgcgtcgcatcgaccctgcgcccaagctgcatcatcgaaattgccgtcaaccaagctctgatagagttggtcaagaccaatgcggagcatatacgcccggagccgcggcgatcctgcaagctccggatgcctccgctcgaagtagcgcgtctgctgctccatacaagccaaccacggcctccagaagaagatgttggcgacctcgtattgggaatccccgaacatcgcctcgctccagtcaatgaccgctgttatgcggccattgtccgtcaggacattgttggagccgaaatccgcgtgcacgaggtgccggacttcggggcagtcctcggcccaaagcatcagctcatcgagagcctgcgcgacggacgcactgacggtgtcgtccatcacagtttgccagtgatacacatggggatcagcaatcgcgcatatgaaatcacgccatgtagtgtattgaccgattccttgcggtccgaatgggccgaacccgctcgtctggctaagatcggccgcagcgatcgcatccatagcctccgcgaccggctgcagaacagcgggcagttcggtttcaggcaggtcttgcaacgtgacaccctgtgcacggcgggagatgcaataggtcaggctctcgctgaattccccaatgtcaagcacttccggaatcgggagcgcggccgatgcaaagtgccgataaacataacgatctttgtagaaaccatcggcgcagctatttacccgcaggacatatccacgccctcctacatcgaagctgaaagcacgagattcttcgccctccgagagctgcatcaggtcggagacgctgtcgaacttttcgatcagaaacttctcgacagacgtcgcggtgagttcaggcttttccatgggtatatctccttcttaaagttaaacaaaattatttctagagggaaaccgttgtggtctccctatagtgagtcgtattaatttcgcgggatcgagatcgatccaattccaatcccacaaaaatctgagcttaacagcacagttgctcctctcagagcagaatcgggtattcaacaccctcatatcaactactacgttgtgtataacggtccacatgccggtatatacgatgactggggttgtacaaaggcggcaacaaacggcgttcccggagttgcacacaagaaatttgccactattacagaggcaagagcagcagctgacgcgtacacaacaagtcagcaaacagacaggttgaacttcatccccaaaggagaagctcaactcaagcccaagagctttgctaaggccctaacaagcccaccaaagcaaaaagcccactggctcacgctaggaaccaaaaggcccagcagtgatccagccccaaaagagatctcctttgccccggagattacaatggacgatttcctctatctttacgatctaggaaggaagttcgaaggtgaaggtgacgacactatgttcaccactgataatgagaaggttagcctcttcaatttcagaaagaatgctgacccacagatggttagagaggcctacgcagcaggtctcatcaagacgatctacccgagtaacaatctccaggagatcaaataccttcccaagaaggttaaagatgcagtcaaaagattcaggactaattgcatcaagaacacagagaaagacatatttctcaagatcagaagtactattccagtatggacgattcaaggcttgcttcataaaccaaggcaagtaatagagattggagtctctaaaaaggtagttcctactgaatctaaggccatgcatggagtctaagattcaaatcgaggatctaacagaactcgccgtgaagactggcgaacagttcatacagagtcttttacgactcaatgacaagaagaaaatcttcgtcaacatggtggagcacgacactctggtctactccaaaaatgtcaaagatacagtctcagaagaccaaagggctattgagacttttcaacaaaggataatttcgggaaacctcctcggattccattgcccagctatctgtcacttcatcgaaaggacagtagaaaaggaaggtggctcctacaaatgccatcattgcgataaaggaaaggctatcattcaagatgcctctgccgacagtggtcccaaagatggacccccacccacgaggagcatcgtggaaaaagaagacgttccaaccacgtcttcaaagcaagtggattgatgtgacatctccactgacgtaagggatgacgcacaatcccactatccttcgcaagacccttcctctatataaggaagttcatttcatttggagaggacacgctcgagctcatttctctattacttcagccataacaaaagaactcttttctcttcttattaaaccatgaaaaagcctgaactcaccgcgacgtctgtcgagaagtttctgatcgaaaagttcgacagcgtctccgacctgatgcagctctcggagggcgaagaatctcgtgctttcagcttcgatgtaggagggcgtggatatgtcctgcgggtaaatagctgcgccgatggtttctacaaagatcgttatgtttatcggcactttgcatcggccgcgctcccgattccggaagtgcttgacattggggaattcagcgagagcctgacctattgcatctcccgccgtgcacagggtgtcacgttgcaagacctgcctgaaaccgaactgcccgctgttctgcagccggtcgcggaggccatggatgcgatcgctgcggccgatcttagccagacgagcgggttcggcccattcggaccgcaaggaatcggtcaatacactacatggcgtgatttcatatgcgcgattgctgatccccatgtgtatcactggcaaactgtgatggacgacaccgtcagtgcgtccgtcgcgcaggctctcgatgagctgatgctttgggccgaggactgccccgaagtccggcacctcgtgcacgcggatttcggctccaacaatgtcctgacggacaatggccgcataacagcggtcattgactggagcgaggcgatgttcggggattcccaatacgaggtcgccaacatcttcttctggaggccgtggttggcttgtatggagcagcagacgcgctacttcgagcggaggcatccggagcttgcaggatcgccgcggctccgggcgtatatgctccgcattggtcttgaccaactctatcagagcttggttgacggcaatttcgatgatgcagcttgggcgcagggtcgatgcgacgcaatcgtccgatccggagccgggactgtcgggcgtacacaaatcgcccgcagaagcgcggccgtctggaccgatggctgtgtagaagtactcgccgatagtggaaaccgacgccccagcactcgtccgagggcaaaggaatagtgaggtacctaaagaaggagtgcgtcgaagcagatcgttcaaacatttggcaataaagtttcttaagattgaatcctgttgccggtcttgcgatgattatcatataatttctgttgaattacgttaagcatgtaataattaacatgtaatgcatgacgttatttatgagatgggtttttatgattagagtcccgcaattatacatttaatacgcgatagaaaacaaaatatagcgcgcaaactaggataaattatcgcgcgcggtgtcatctatgttactagatcgatgtcgaatctgatcaacctgcattaatgaatcggccaacgcgcggggagaggcggtttgcgtattgggcgctcttccgcttcctcgctcactgactcgctgcgctcggtcgttcggctgcggcgagcggtatcagctcactcaaaggcggtaatacggttatccacagaatcaggggataacgcaggaaagaacatgtgagcaaaaggccagcaaaaggccaggaaccgtaaaaaggccgcgttgctggcgtttttccataggctccgcccccctgacgagcatcacaaaaatcgacgctcaagtcagaggtggcgaaacccgacaggactataaagataccaggcgtttccccctggaagctccctcgtgcgctctcctgttccgaccctgccgcttaccggatacctgtccgcctttctcccttcgggaagcgtggcgctttctcaatgctcacgctgtaggtatctcagttcggtgtaggtcgttcgctccaagctgggctgtgtgcacgaaccccccgttcagcccgaccgctgcgccttatccggtaactatcgtcttgagtccaacccggtaagacacgacttatcgccactggcagcagccactggtaacaggattagcagagcgaggtatgtaggcggtgctacagagttcttgaagtggtggcctaactacggctacactagaaggacagtatttggtatctgcgctctgctgaagccagttaccttcggaaaaagagttggtagctcttgatccggcaaacaaaccaccgctggtagcggtggtttttttgtttgcaagcagcagattacgcgcagaaaaaaaggatctcaagaagatcctttgatcttttctacggggtctgacgctcagtggaacgaaaactcacgttaagggattttggtcatgacattaacctataaaaataggcgtatcacgaggccctttcgtctcgcgcgtttcggtgatgacggtgaaaacctctgacacatgcagctcccggagacggtcacagcttgtctgtaagcggatgccgggagcagacaagcccgtcagggcgcgtcagcgggtgttggcgggtgtcggggctggcttaactatgcggcatcagagcagattgtactgagagtgcaccatatggacatattgtcgttagaacgcggctacaattaatacataaccttatgtatcatacacatacgatttaggtgacactatagaacggcgcgccaagcttggatcctctagacgtacggtaccatctgctaatattttaaatcacatgcaagagaggaggcatggttccattttctaccttcacattatttgagaaaaacgaacttgttctgtgttttatttttgcccttcacattagtacaacgtggaagactcatggttacacagaatcatacataagtacaatgcttgtccctaagaaaacaagcactcgttgtattgaacctttacggctcatgcggccgctgaagtattgcttcttagttaacctttcctttctctctcagctatgtgaattcattttgctttcgtcacaatttatatagtgaaattggatctttggagttaacgccttcacaggattatcgtgttagaacaatgctttttcatgttctaattagtagtacattacaaatgtgcactctattcaataagcatcttttggcacgttaataaatcatgtgaaaaaaaaatactactatttcaaagaaagtgttgtaaaaagaaacggaaagagagctggcttcagttgttgagacttgtttgctagtaaaaatggtgtgaagagtgattcatggtgaggtggtttttcgtccctttctgtttgcatgaaaaacaaatggcaagagatgacgtaggattccttcccttaacgattatctgtttttaatttcaaatatacatataggaatttatgaattactaaggttgtaaaatatgctggtcatttatttatggctaaaatatttttttttctcgtaaatataaaaatatttaaaatttatttttatcatattttttatccttataaaattatgtgtacaacctatataaaaaaatatcatatttaatattgattatatgtttaatcaatataaaaaatcattatcatatatttagatttattcgaatatacatctaaacaaaaaataacatattttaattttatgaagaaaaaaaaatattttatcctttatttatttaagattaattaatagttatgtattgtggaaagacttttacacatgcaatagatatactgaatcaattagatgccaatgctgagttggaaatcacttgaggaggggaggagacttgccaatgcttttcagtttcatttaaatgatttagtggaggagatagagtagtgataaaggcatgccccaattttggagtgtatatatgagtggaaataagagagggatagagagaaaaaataaagagagtaaaaataattaatgtgaaatgatatgataaaaaaataaagaaagagataaagagaaaaatgaaatgagagatagatgaaatagagagtagatacatgtttgtttaggttttttttaggaaataacacatttttttctcatcacttattactcactgtcaatttcctctctttcaatcataatgatatgatttgtttaacaaaaatgtgaaaaaacatataaagtaaaatatttttataaattgataaataaaaatttacaaaatttatttcttattaaattgaatagaaaatgaaagaaaagaaaagaaaaagtatatataaaatgatatagctttaaaaagaataaatttttcatatcagtctttttttaataatttagaaatatttaagtatatagcaaaaatataatgtactttacatatgcataaataataatttgaaaatagaactaatagaatagagaaaaaagtaatataataattaactatatgaaaatttagaagggacaatatttttaattaagaatataaacaatatttcttttcatgtaatgagggacggatgtacggggccagtgttggagtcaaagccaaaatagtcacggggaaattaatgcactgcatgactattcgaaaaaattcactagccttacttagatgttagattaatagctagggggtgcagataattttgaaaggcatgaaaaacattaatttgtacattgcaagcttttgatgacaagctttgcaattgttcacactaccttatgccatttataaatagagtgattggcatatgaaggaaatcatgagagtcgaagcgaaaaacaaagcttgagagtgtaggaaaaatacagtttttttggtaaaaatacagtatttgaataggagcgaaaaatatcctttcaaaatgatccttttctttttttttttttttcttgttgttcttggtcagttattcaaaggaaaagggattgaaataaaaacttgcatgtgggatc

SEQ ID NO: 168 - DNA, 13308 bp, Artificial Sequence
  plasmid pKS387
tcgacggcgcgcccgatcatccggatatagttcctcctttcagcaaaaaacccctcaagacccgtttagaggccccaaggggttatgctagttattgctcagcggtggcagcagccaactcagcttcctttcgggctttgttagcagccggatcgatccaagctgtacctcactattcctttgccctcggacgagtgctggggcgtcggtttccactatcggcgagtacttctacacagccatcggtccagacggccgcgcttctgcgggcgatttgtgtacgcccgacagtcccggctccggatcggacgattgcgtcgcatcgaccctgcgcccaagctgcatcatcgaaattgccgtcaaccaagctctgatagagttggtcaagaccaatgcggagcatatacgcccggagccgcggcgatcctgcaagctccggatgcctccgctcgaagtagcgcgtctgctgctccatacaagccaaccacggcctccagaagaagatgttggcgacctcgtattgggaatccccgaacatcgcctcgctccagtcaatgaccgctgttatgcggccattgtccgtcaggacattgttggagccgaaatccgcgtgcacgaggtgccggacttcggggcagtcctcggcccaaagcatcagctcatcgagagcctgcgcgacggacgcactgacggtgtcgtccatcacagtttgccagtgatacacatggggatcagcaatcgcgcatatgaaatcacgccatgtagtgtattgaccgattccttgcggtccgaatgggccgaacccgctcgtctggctaagatcggccgcagcgatcgcatccatagcctccgcgaccggctgcagaacagcgggcagttcggtttcaggcaggtcttgcaacgtgacaccctgtgcacggcgggagatgcaataggtcaggctctcgctgaattccccaatgtcaagcacttccggaatcgggagcgcggccgatgcaaagtgccgataaacataacgatctttgtagaaaccatcggcgcagctatttacccgcaggacatatccacgccctcctacatcgaagctgaaagcacgagattcttcgccctccgagagctgcatcaggtcggagacgctgtcgaacttttcgatcagaaacttctcgacagacgtcgcggtgagttcaggcttttccatgggtatatctccttcttaaagttaaacaaaattatttctagagggaaaccgttgtggtctccctatagtgagtcgtattaatttcgcgggatcgagatctgatcaacctgcattaatgaatcggccaacgcgcggggagaggcggtttgcgtattgggcgctcttccgcttcctcgctcactgactcgctgcgctcggtcgttcggctgcggcgagcggtatcagctcactcaaaggcggtaatacggttatccacagaatcaggggataacgcaggaaagaacatgtgagcaaaaggccagcaaaaggccaggaaccgtaaaaaggccgcgttgctggcgtttttccataggctccgcccccctgacgagcatcacaaaaatcgacgctcaagtcagaggtggcgaaacccgacaggactataaagataccaggcgtttccccctggaagctccctcgtgcgctctcctgttccgaccctgccgcttaccggatacctgtccgcctttctcccttcgggaagcgtggcgctttctcaatgctcacgctgtaggtatctcagttcggtgtaggtcgttcgctccaagctgggctgtgtgcacgaaccccccgttcagcccgaccgctgcgccttatccggtaactatcgtcttgagtccaacccggtaagacacgacttatcgccactggcagcagccactggtaacaggattagcagagcgaggtatgtaggcggtgctacagagttcttgaagtggtggcctaactacggctacactagaaggacagtatttggtatctgcgctctgctgaagccagttaccttcggaaaaagagttggtagctcttgatccggcaaacaaaccaccgctggtagcggtggtttttttgtttgcaagcagcagattacgcgcagaaaaaaaggatctcaagaagatcctttgatcttttctacggggtctgacgctcagtggaacgaaaactcacgttaagggattttggtcatgacattaacctataaaaataggcgtatcacgaggccctttcgtctcgcgcgtttcggtgatgacggtgaaaacctctgacacatgcagctcccggagacggtcacagcttgtctgtaagcggatgccgggagcagacaagcccgtcagggcgcgtcagcgggtgttggcgggtgtcggggctggcttaactatgcggcatcagagcagattgtactgagagtgcaccatatggacatattgtcgttagaacgcggctacaattaatacataaccttatgtatcatacacatacgatttaggtgacactatagaacggcgcgccaagcttggatcctagaactagaaacgtgatgccacttgttattgaagtcgattacagcatctattctgttttactatttataactttgccatttctgacttttgaaaactatctctggatttcggtatcgctttgtgaagatcgagcaaaagagacgttttgtggacgcaatggtccaaatccgttctacatgaacaaattggtcacaatttccactaaaagtaaataaatggcaagttaaaaaaggaatatgcattttactgattgcctaggtgagctccaagagaagttgaatctacacgtctaccaaccgctaaaaaaagaaaaacattgatatgtaacctgattccattagcttttgacttcttcaacagattctctacttagatttctaacagaaatattattactagcacatcattttcagtctcactacagcaaaaaatccaacggcacaatacagacaacaggagatatcagactacagagatagatagatgctactgcatgtagtaagttaaataaaaggaaaataaaatgtcttgctaccaaaactactacagactatgatgctcaccacaggccaaatcctgcaactaggacagcattatcttatatatattgtacaaaacaagcatcaaggaacatttggtctaggcaatcagtacctcgttctaccatcaccctcagttatcacatccttgaaggatccattactgggaatcatcggcaacacatgctcctgatggggcacaatgacatcaagaaggtaggggccaggggtgtccaacattctctgaattgccgctctaagctcttccttcttcgtcactcgcgctgccggtatcccacaagcatcagcaaacttgagcatgtttgggaatatctcgctctcgctagacggatctccaagataggtgtgagctctattggacttgtagaacctatcctccaactgaaccaccatacccaaatgctgattgttcaacaacaatatcttaactgggagattctccactcttatagtggccaactcctgaacattcatgatgaaactaccatccccatcaatgtcaaccacaacagccccagggttagcaacagcagcaccaatagccgcaggcaatccaaaacccatggctccaagaccccctgaggtcaaccactgcctcggtctcttgtacttgtaaaactgcgcagcccacatttgatgctgcccaaccccagtactaacaatagcatctccattagtcaactcatcaagaacctcgatagcatgctgcggagaaatcgcgtcctggaatgtcttgtaacccaatggaaacttgtgtttctgcacattaatctcttctctccaacctccaagatcaaacttaccctccactcctttctcctccaaaatcatattaattcccttcaaggccaacttcaaatccgcgcaaaccgacacgtgcgcctgcttgttcttcccaatctcggcagaatcaatatcaatgtgaacaatcttagccctactagcaaaagcctcaagcttcccagtaacacggtcatcaaaccttaccccaaaggcaagcaacaaatcactattgtcaacagcatagttagcataaacagtaccatgcatacccagcatctgaagggaatattcatcaccaataggaaaagttccaagacccattaaagtgctagcaacgggaataccagtgagttcaacaaagcgcctcaattcagcactggaattcaaactgccaccgccgacgtagagaacgggcttttgggcctccatgatgagtctgacaatgtgttccaattgggcctcggcggggggcctgggcagcctggcgaggtaaccggggaggttaacgggctcgtcccaattaggcacggcgagttgctgctgaacgtctttgggaatgtcgatgaggaccggaccggggcggccggaggtggcgacgaagaaagcctcggcgacgacgcgggggatgtcgtcgacgtcgaggatgaggtagttgtgcttcgtgatggatctgctcacctccacgatcggggtttcttggaaggcgtcggtgccgatcatccggcgggcgacctggccggtgatggcgacgactgggacgctgtccattaaagcgtcggcgaggccgctcacgaggttggtggcgccggggccggaggtggcaatgcagacgccggggaggccggaggaacgcgcgtagccttcggcggcgaagacgccgccctgctcgtggcgcgggagcacgttgcggatggcggcggagcgcgtgagcgcctggtggatctccatcgacgcaccgccggggtacgcgaacaccgtcgtcacgccctgcctctccagcgcctccacaaggatgtccgcgcccttgcgaggttcgccggaggcgaaccgtgacacgaagggctccgtggtcggcgcttccttggtgaagggcgccgccgtggggggtttggagatggaacatttgattttgagagcgtggttgggtttggtgagggtttgatgagagagagggagggtggatctagtaatgcgtttggggaaggtggggtgtgaagaggaagaagagaatcgggtggttctggaagcggtggccgccattgtgttgtgtggcatggttatacttcaaaaactgcacaacaagcctagagttagtacctaaacagtaaatttacaacagagagcaaagacacatgcaaaaatttcagccataaaaaaagttataatagaatttaaagcaaaagtttcattttttaaacatatatacaaacaaactggatttgaaggaagggattaattcccctgctcaaagtttgaattcctattgtgacctatactcgaataaaattgaagcctaaggaatgtatgagaaacaagaaaacaaaacaaaactacagacaaacaagtacaattacaaaattcgctaaaattctgtaatcaccaaaccccatctcagtcagcacaaggcccaaggtttattttgaaataaaaaaaaagtgattttatttctcataagctaaaagaaagaaaggcaattatgaaatgatttcgactagatctgaaagtccaacgcgtattccgcagatattaaagaaagagtagagtttcacatggatcctagatggacccagttgaggaaaaagcaaggcaaagcaaaccagaagtgcaagatccgaaattgaaccacggaatctaggatttggtagagggagaagaaaagtaccttgagaggtagaagagaagagaagagcagagagatatatgaacgagtgtgtcttggtctcaactctgaagcgatacgagtttagaggggagcattgagttccaatttatagggaaaccgggtggcaggggtgagttaatgacggaaaagcccctaagtaacgagattggattgtgggttagattcaaccgtttgcatccgcggcttagattggggaagtcagagtgaatctcaaccgttgactgagttgaaaattgaatgtagcaaccaattgagccaaccccagcctttgccctttgattttgatttgtttgttgcatactttttatttgtcttctggttctgactctctttctctcgtttcaatgccaggttgcctactcccacaccactcacaagaagattctactgttagtattaaatattttttaatgtattaaatgatgaatgcttttgtaaacagaacaagactatgtctaataagtgtcttgcaacattttttaagaaattaaaaaaaatatatttattatcaaaatcaaatgtatgaaaaatcatgaataatataattttatacatttttttaaaaaatcttttaatttcttaattaatatcttaaaaataatgattaatatttaacccaaaataattagtatgattggtaaggaagatatccatgttatgtttggatgtgagtttgatctagagcaaagcttactagagtcgacgcgccaagcttttgatccatgcccttcatttgccgcttattaattaatttggtaacagtccgtactaatcagttacttatccttcccccatcataattaatcttggtagtctcgaatgccacaacactgactagtctcttggatcataagaaaaagccaaggaacaaaagaagacaaaacacaatgagagtatcctttgcatagcaatgtctaagttcataaaattcaaacaaaaacgcaatcacacacagtggacatcacttatccactagctgatcaggatcgccgcgtcaagaaaaaaaaactggaccccaaaagccatgcacaacaacacgtactcacaaaggtgtcaatcgagcagcccaaaacattcaccaactcaacccatcatgagccctcacatttgttgtttctaacccaacctcaaactcgtattctcttccgccacctcatttttgtttatttcaacacccgtcaaactgcatgccaccccgtggccaaatgtccatgcatgttaacaagacctatgactataaatagctgcaatctcggcccaggttttcatcatcaagaaccagttcaatatcctagtacaccgtattaaagaatttaagatatactgcggccgcatgactatcgactcacaatactacaagtcgcgagacaaaaacgacacggcacccaaaatcgcgggaatccgatatgccccgctatcgacaccattactcaaccgatgtgagaccttctctctggtctggcacattttcagcattcccactttcctcacaattttcatgctatgctgcgcaattccactgctctggccatttgtgattgcgtatgtagtgtacgctgttaaagacgactccccgtccaacggaggagtggtcaagcgatactcgcctatttcaagaaacttcttcatctggaagctctttggccgctacttccccataactctgcacaagacggtggatctggagcccacgcacacatactaccctctggacgtccaggagtatcacctgattgctgagagatactggccgcagaacaagtacctccgagcaatcatctccaccatcgagtactttctgcccgccttcatgaaacggtctctttctatcaacgagcaggagcagcctgccgagcgagatcctctcctgtctcccgtttctcccagctctccgggttctcaacctgacaagtggattaaccacgacagcagatatagccgtggagaatcatctggctccaacggccacgcctcgggctccgaacttaacggcaacggcaacaatggcaccactaaccgacgacctttgtcgtccgcctctgctggctccactgcatctgattccacgcttcttaacgggtccctcaactcctacgccaaccagatcattggcgaaaacgacccacagctgtcgcccacaaaactcaagcccactggcagaaaatacatcttcggctaccacccccacggcattatcggcatgggagcctttggtggaattgccaccgagggagctggatggtccaagctctttccgggcatccctgtttctcttatgactctcaccaacaacttccgagtgcctctctacagagagtacctcatgagtctgggagtcgcttctgtctccaagaagtcctgcaaggccctcctcaagcgaaaccagtctatctgcattgtcgttggtggagcacaggaaagtcttctggccagacccggtgtcatggacctggtgctactcaagcgaaagggttttgttcgacttggtatggaggtcggaaatgtcgcccttgttcccatcatggcctttggtgagaacgacctctatgaccaggttagcaacgacaagtcgtccaagctgtaccgattccagcagtttgtcaagaacttccttggattcacccttcctttgatgcatgcccgaggcgtcttcaactacgatgtcggtcttgtcccctacaggcgacccgtcaacattgtggttggttcccccattgacttgccttatctcccacaccccaccgacgaagaagtgtccgaataccacgaccgatacatcgccgagctgcagcgaatctacaacgagcacaaggatgaatatttcatcgattggaccgaggagggcaaaggagccccagagttccgaatgattgagtaagcggccgcaagtatgaactaaaatgcatgtaggtgtaagagctcatggagagcatggaatattgtatccgaccatgtaacagtataataactgagctccatctcacttcttctatgaataaacaaaggatgttatgatatattaacactctatctatgcaccttattgttctatgataaatttcctcttattattataaatcatctgaatcgtgacggcttatggaatgcttcaaatagtacaaaaacaaatgtgtactataagactttctaaacaattctaaccttagcattgtgaacgagacataagtgttaagaagacataacaattataatggaagaagtttgtctccatttatatattatatattacccacttatgtattatattaggatgttaaggagacataacaattataaagagagaagtttgtatccatttatatattatatactacccatttatatattatacttatccacttatttaatgtctttataaggtttgatccatgatatttctaatattttagttgatatgtatatgaaagggtactatttgaactctcttactctgtataaaggttggatcatccttaaagtgggtctatttaattttattgcttcttacagataaaaaaaaaattatgagttggtttgataaaatattgaaggatttaaaataataataaataacatataatatatgtatataaatttattataatataacatttatctataaaaaagtaaatattgtcataaatctatacaatcgtttagccttgctggacgaatctcaattatttaaacgagagtaaacatatttgactttttggttatttaacaaattattatttaacactatatgaaatttttttttttatcagcaaagaataaaattaaattaagaaggacaatggtgtcccaatccttatacaaccaacttccacaagaaagtcaagtcagagacaacaaaaaaacaagcaaaggaaattttttaatttgagttgtcttgtttgctgcataatttatgcagtaaaacactacacataacccttttagcagtagagcaatggttgaccgtgtgcttagcttcttttattttatttttttatcagcaaagaataaataaaataaaatgagacacttcagggatgtttcaacaagcttggatcctagcctaagtacgtactcaaaatgccaacaaataaaaaaaaagttgctttaataatgccaaaacaaattaataaaacacttacaacaccggattttttttaattaaaatgtgccatttaggataaatagttaatatttttaataattatttaaaaagccgtatctactaaaatgatttttatttggttgaaaatattaatatgtttaaatcaacacaatctatcaaaattaaactaaaaaaaaaataagtgtacgtggttaacattagtacagtaatataagaggaaaatgagaaattaagaaattgaaagcgagtctaatttttaaattatgaacctgcatatataaaaggaaagaaagaatccaggaagaaaagaaatgaaaccatgcatggtcccctcgtcatcacgagtttctgccatttgcaatagaaacactgaaacacctttctctttgtcacttaattgagatgccgaagccacctcacaccatgaacttcatgaggtgtagcacccaaggcttccatagccatgcatactgaagaatgtctcaagctcagcaccctacttctgtgacgtgtccctcattcaccttcctctcttccctataaataaccacgcctcaggttctccgcttcacaactcaaacattctctccattggtccttaaacactcatcagtcatcaccatggaggtccgacgacgaaagatagacgtgctcaaggcccagaaaaacggctacgaatcgggcccaccatctcgacaatcgtcgcagccctcctcaagagcatcgtccagaacccgcaacaaacactcctcgtccaccctgtcgctcagcggactgaccatgaaagtccagaagaaacctgcgggacccccggcgaactccaaaacgccattcctacacatcaagcccgtgcacacgtgctgctccacatcaatgctttcgcgcgattatgacggctccaaccccagcttcaagggcttcaaaaacatcggcatgatcattctcattgtgggaaatctacggctcgcattcgaaaactacctcaaatacggcatttccaacccgttcttcgaccccaaaattactccttccgagtggcagctctcaggcttgctcatagtcgtggcctacgcacatatcctcatggcctacgctattgagagcgctgccaagctgctgttcctctctagcaaacaccactacatggccgtggggcttctgcataccatgaacactttgtcgtccatctcgttgctgtcctacgtcgtctactactacctgcccaaccccgtggcaggcacaatagtcgagtttgtggccgttattctgtctctcaaactcgcctcatacgccctcactaactcggatctccgaaaagccgcaattcatgcccagaagctcgacaagacgcaagacgataacgaaaaggaatccacctcgtcttcctcttcttcagatgacgcagagactttggcagacattgacgtcattcctgcatactacgcacagctgccctacccccagaatgtgacgctgtcgaacctgctgtacttctggtttgctcccacactggtctaccagcccgtgtaccccaagacggagcgtattcgacccaagcacgtgatccgaaacctgtttgagctcgtctctctgtgcatgcttattcagtttctcatcttccagtacgcctaccccatcatgcagtcgtgtctggctctgttcttccagcccaagctcgattatgccaacatctccgagcgcctcatgaagttggcctccgtgtctatgatggtctggctcattggattctacgctttcttccagaacggtctcaatcttattgccgagctcacctgttttggaaacagaaccttctaccagcagtggtggaattcccgctccattggccagtactggactctatggaacaagccagtcaaccagtactttagacaccacgtctacgtgcctcttctcgctcggggcatgtcgcggttcaatgcgtcggtggtggttttctttttctccgccgtcatccatgaactgcttgtcggcatccccactcacaacatcatcggagccgccttcttcggcatgatgtcgcaggtgcctctgatcatggctactgagaaccttcagcatattaactcctctctgggccccttccttggcaactgtgcattctggttcacctttttcctgggacaacccacttgtgcattcctttactatttggcctacaactacaagcagaaccagtagcggccgcaagtatgaactaaaatgcatgtaggtgtaagagctcatggagagcatggaatattgtatccgaccatgtaacagtataataactgagctccatctcacttcttctatgaataaacaaaggatgttatgatatattaacactctatctatgcaccttattgttctatgataaatttcctcttattattataaatcatctgaatcgtgacggcttatggaatgcttcaaatagtacaaaaacaaatgtgtactataagactttctaaacaattctaaccttagcattgtgaacgagacataagtgttaagaagacataacaattataatggaagaagtttgtctccatttatatattatatattacccacttatgtattatattaggatgttaaggagacataacaattataaagagagaagtttgtatccatttatatattatatactacccatttatatattatacttatccacttatttaatgtctttataaggtttgatccatgatatttctaatattttagttgatatgtatatgaaagggtactatttgaactctcttactctgtataaaggttggatcatccttaaagtgggtctatttaattttattgcttcttacagataaaaaaaaaattatgagttggtttgataaaatattgaaggatttaaaataataataaataacatataatatatgtatataaatttattataatataacatttatctataaaaaagtaaatattgtcataaatctatacaatcgtttagccttgctggacgaatctcaattatttaaacgagagtaaacatatttgactttttggttatttaacaaattattatttaacactatatgaaatttttttttttatcagcaaagaataaaattaaattaagaaggacaatggtgtcccaatccttatacaaccaacttccacaagaaagtcaagtcagagacaacaaaaaaacaagcaaaggaaattttttaatttgagttgtcttgtttgctgcataatttatgcagtaaaacactacacataacccttttagcagtagagcaatggttgaccgtgtgcttagcttcttttattttatttttttatcagcaaagaataaataaaataaaatgagacacttcagggatgtttcaacaagctctagactggaattcgtcgacggcgcg

SEQ ID NO: 169 - DNA, 6498 bp, Artificial Sequence
  plasmid pKS178
gatccgtcgacggcgcgcccgatcatccggatatagttcctcctttcagcaaaaaacccctcaagacccgtttagaggccccaaggggttatgctagttattgctcagcggtggcagcagccaactcagcttcctttcgggctttgttagcagccggatcgatccaagctgtacctcactattcctttgccctcggacgagtgctggggcgtcggtttccactatcggcgagtacttctacacagccatcggtccagacggccgcgcttctgcgggcgatttgtgtacgcccgacagtcccggctccggatcggacgattgcgtcgcatcgaccctgcgcccaagctgcatcatcgaaattgccgtcaaccaagctctgatagagttggtcaagaccaatgcggagcatatacgcccggagccgcggcgatcctgcaagctccggatgcctccgctcgaagtagcgcgtctgctgctccatacaagccaaccacggcctccagaagaagatgttggcgacctcgtattgggaatccccgaacatcgcctcgctccagtcaatgaccgctgttatgcggccattgtccgtcaggacattgttggagccgaaatccgcgtgcacgaggtgccggacttcggggcagtcctcggcccaaagcatcagctcatcgagagcctgcgcgacggacgcactgacggtgtcgtccatcacagtttgccagtgatacacatggggatcagcaatcgcgcatatgaaatcacgccatgtagtgtattgaccgattccttgcggtccgaatgggccgaacccgctcgtctggctaagatcggccgcagcgatcgcatccatagcctccgcgaccggctgcagaacagcgggcagttcggtttcaggcaggtcttgcaacgtgacaccctgtgcacggcgggagatgcaataggtcaggctctcgctgaattccccaatgtcaagcacttccggaatcgggagcgcggccgatgcaaagtgccgataaacataacgatctttgtagaaaccatcggcgcagctatttacccgcaggacatatccacgccctcctacatcgaagctgaaagcacgagattcttcgccctccgagagctgcatcaggtcggagacgctgtcgaacttttcgatcagaaacttctcgacagacgtcgcggtgagttcaggcttttccatgggtatatctccttcttaaagttaaacaaaattatttctagagggaaaccgttgtggtctccctatagtgagtcgtattaatttcgcgggatcgagatctgatcaacctgcattaatgaatcggccaacgcgcggggagaggcggtttgcgtattgggcgctcttccgcttcctcgctcactgactcgctgcgctcggtcgttcggctgcggcgagcggtatcagctcactcaaaggcggtaatacggttatccacagaatcaggggataacgcaggaaagaacatgtgagcaaaaggccagcaaaaggccaggaaccgtaaaaaggccgcgttgctggcgtttttccataggctccgcccccctgacgagcatcacaaaaatcgacgctcaagtcagaggtggcgaaacccgacaggactataaagataccaggcgtttccccctggaagctccctcgtgcgctctcctgttccgaccctgccgcttaccggatacctgtccgcctttctcccttcgggaagcgtggcgctttctcaatgctcacgctgtaggtatctcagttcggtgtaggtcgttcgctccaagctgggctgtgtgcacgaaccccccgttcagcccgaccgctgcgccttatccggtaactatcgtcttgagtccaacccggtaagacacgacttatcgccactggcagcagccactggtaacaggattagcagagcgaggtatgtaggcggtgctacagagttcttgaagtggtggcctaactacggctacactagaaggacagtatttggtatctgcgctctgctgaagccagttaccttcggaaaaagagttggtagctcttgatccggcaaacaaaccaccgctggtagcggtggtttttttgtttgcaagcagcagattacgcgcagaaaaaaaggatctcaagaagatcctttgatcttttctacggggtctgacgctcagtggaacgaaaactcacgttaagggattttggtcatgacattaacctataaaaataggcgtatcacgaggccctttcgtctcgcgcgtttcggtgatgacggtgaaaacctctgacacatgcagctcccggagacggtcacagcttgtctgtaagcggatgccgggagcagacaagcccgtcagggcgcgtcagcgggtgttggcgggtgtcggggctggcttaactatgcggcatcagagcagattgtactgagagtgcaccatatggacatattgtcgttagaacgcggctacaattaatacataaccttatgtatcatacacatacgatttaggtgacactatagaacggcgcgccaagcttggatcctagaactagaaacgtgatgccacttgttattgaagtcgattacagcatctattctgttttactatttataactttgccatttctgacttttgaaaactatctctggatttcggtatcgctttgtgaagatcgagcaaaagagacgttttgtggacgcaatggtccaaatccgttctacatgaacaaattggtcacaatttccactaaaagtaaataaatggcaagttaaaaaaggaatatgcattttactgattgcctaggtgagctccaagagaagttgaatctacacgtctaccaaccgctaaaaaaagaaaaacattgatatgtaacctgattccattagcttttgacttcttcaacagattctctacttagatttctaacagaaatattattactagcacatcattttcagtctcactacagcaaaaaatccaacggcacaatacagacaacaggagatatcagactacagagatagatagatgctactgcatgtagtaagttaaataaaaggaaaataaaatgtcttgctaccaaaactactacagactatgatgctcaccacaggccaaatcctgcaactaggacagcattatcttatatatattgtacaaaacaagcatcaaggaacatttggtctaggcaatcagtacctcgttctaccatcaccctcagttatcacatccttgaaggatccattactgggaatcatcggcaacacatgctcctgatggggcacaatgacatcaagaaggtaggggccaggggtgtccaacattctctgaattgccgctctaagctcttccttcttcgtcactcgcgctgccggtatcccacaagcatcagcaaacttgagcatgtttgggaatatctcgctctcgctagacggatctccaagataggtgtgagctctattggacttgtagaacctatcctccaactgaaccaccatacccaaatgctgattgttcaacaacaatatcttaactgggagattctccactcttatagtggccaactcctgaacattcatgatgaaactaccatccccatcaatgtcaaccacaacagccccagggttagcaacagcagcaccaatagccgcaggcaatccaaaacccatggctccaagaccccctgaggtcaaccactgcctcggtctcttgtacttgtaaaactgcgcagcccacatttgatgctgcccaaccccagtactaacaatagcatctccattagtcaactcatcaagaacctcgatagcatgctgcggagaaatcgcgtcctggaatgtcttgtaacccaatggaaacttgtgtttctgcacattaatctcttctctccaacctccaagatcaaacttaccctccactcctttctcctccaaaatcatattaattcccttcaaggccaacttcaaatccgcgcaaaccgacacgtgcgcctgcttgttcttcccaatctcggcagaatcaatatcaatgtgaacaatcttagccctactagcaaaagcctcaagcttcccagtaacacggtcatcaaaccttaccccaaaggcaagcaacaaatcactattgtcaacagcatagttagcataaacagtaccatgcatacccagcatctgaagggaatattcatcaccaataggaaaagttccaagacccattaaagtgctagcaacgggaataccagtgagttcaacaaagcgcctcaattcagcactggaattcaaactgccaccgccgacgtagagaacgggcttttgggcctccatgatgagtctgacaatgtgttccaattgggcctcggcggggggcctgggcagcctggcgaggtaaccggggaggttaacgggctcgtcccaattaggcacggcgagttgctgctgaacgtctttgggaatgtcgatgaggaccggaccggggcggccggaggtggcgacgaagaaagcctcggcgacgacgcgggggatgtcgtcgacgtcgaggatgaggtagttgtgcttcgtgatggatctgctcacctccacgatcggggtttcttggaaggcgtcggtgccgatcatccggcgggcgacctggccggtgatggcgacgactgggacgctgtccattaaagcgtcggcgaggccgctcacgaggttggtggcgccggggccggaggtggcaatgcagacgccggggaggccggaggaacgcgcgtagccttcggcggcgaagacgccgccctgctcgtggcgcgggagcacgttgcggatggcggcggagcgcgtgagcgcctggtggatctccatcgacgcaccgccggggtacgcgaacaccgtcgtcacgccctgcctctccagcgcctccacaaggatgtccgcgcccttgcgaggttcgccggaggcgaaccgtgacacgaagggctccgtggtcggcgcttccttggtgaagggcgccgccgtggggggtttggagatggaacatttgattttgagagcgtggttgggtttggtgagggtttgatgagagagagggagggtggatctagtaatgcgtttggggaaggtggggtgtgaagaggaagaagagaatcgggtggttctggaagcggtggccgccattgtgttgtgtggcatggttatacttcaaaaactgcacaacaagcctagagttagtacctaaacagtaaatttacaacagagagcaaagacacatgcaaaaatttcagccataaaaaaagttataatagaatttaaagcaaaagtttcattttttaaacatatatacaaacaaactggatttgaaggaagggattaattcccctgctcaaagtttgaattcctattgtgacctatactcgaataaaattgaagcctaaggaatgtatgagaaacaagaaaacaaaacaaaactacagacaaacaagtacaattacaaaattcgctaaaattctgtaatcaccaaaccccatctcagtcagcacaaggcccaaggtttattttgaaataaaaaaaaagtgattttatttctcataagctaaaagaaagaaaggcaattatgaaatgatttcgactagatctgaaagtccaacgcgtattccgcagatattaaagaaagagtagagtttcacatggatcctagatggacccagttgaggaaaaagcaaggcaaagcaaaccagaagtgcaagatccgaaattgaaccacggaatctaggatttggtagagggagaagaaaagtaccttgagaggtagaagagaagagaagagcagagagatatatgaacgagtgtgtcttggtctcaactctgaagcgatacgagtttagaggggagcattgagttccaatttatagggaaaccgggtggcaggggtgagttaatgacggaaaagcccctaagtaacgagattggattgtgggttagattcaaccgtttgcatccgcggcttagattggggaagtcagagtgaatctcaaccgttgactgagttgaaaattgaatgtagcaaccaattgagccaaccccagcctttgccctttgattttgatttgtttgttgcatactttttatttgtcttctggttctgactctctttctctcgtttcaatgccaggttgcctactcccacaccactcacaagaagattctactgttagtattaaatattttttaatgtattaaatgatgaatgcttttgtaaacagaacaagactatgtctaataagtgtcttgcaacattttttaagaaattaaaaaaaatatatttattatcaaaatcaaatgtatgaaaaatcatgaataatataattttatacatttttttaaaaaatcttttaatttcttaattaatatcttaaaaataatgattaatatttaacccaaaataattagtatgattggtaaggaagatatccatgttatgtttggatgtgagtttgatctagagcaaagcttactagagtcgacc

SEQ ID NO: 170 - DNA, 6063 bp, Artificial Sequence
  plasmid pKR1358
gtacgtgggcggatcccccgggctgcaggaattcactggccgtcgttttacaacgtcgtgactgggaaaaccctggcgttacccaacttaatcgccttgcagcacatccccctttcgccagctggcgtaatagcgaagaggcccgcaccgatcgcccttcccaacagttgcgcagcctgaatggcgaatggcgcctgatgcggtattttctccttacgcatctgtgcggtatttcacaccgcatatggtgcactctcagtacaatctgctctgatgccgcatagttaagccagccccgacacccgccaacacccgctgacgcgccctgacgggcttgtctgctcccggcatccgcttacagacaagctgtgaccgtctccgggagctgcatgtgtcagaggttttcaccgtcatcaccgaaacgcgcgagacgaaagggcctcgtgatacgcctatttttataggttaatgtcatgataataatggtttcttagacgtcaggtggcacttttcggggaaatgtgcgcggaacccctatttgtttatttttctaaatacattcaaatatgtatccgctcatgagacaataaccctgataaatgcttcaataatattgaaaaaggaagagtatgagtattcaacatttccgtgtcgcccttattcccttttttgcggcattttgccttcctgtttttgctcacccagaaacgctggtgaaagtaaaagatgctgaagatcagttgggtgcacgagtgggttacatcgaactggatctcaacagcggtaagatccttgagagttttcgccccgaagaacgttttccaatgatgagcacttttaaagttctgctatgtggcgcggtattatcccgtattgacgccgggcaagagcaactcggtcgccgcatacactattctcagaatgacttggttgagtactcaccagtcacagaaaagcatcttacggatggcatgacagtaagagaattatgcagtgctgccataaccatgagtgataacactgcggccaacttacttctgacaacgatcggaggaccgaaggagctaaccgcttttttgcacaacatgggggatcatgtaactcgccttgatcgttgggaaccggagctgaatgaagccataccaaacgacgagcgtgacaccacgatgcctgtagcaatggcaacaacgttgcgcaaactattaactggcgaactacttactctagcttcccggcaacaattaatagactggatggaggcggataaagttgcaggaccacttctgcgctcggcccttccggctggctggtttattgctgataaatctggagccggtgagcgtgggtctcgcggtatcattgcagcactggggccagatggtaagccctcccgtatcgtagttatctacacgacggggagtcaggcaactatggatgaacgaaatagacagatcgctgagataggtgcctcactgattaagcattggtaactgtcagaccaagtttactcatatatactttagattgatttaaaacttcatttttaatttaaaaggatctaggtgaagatcctttttgataatctcatgaccaaaatcccttaacgtgagttttcgttccactgagcgtcagaccccgtagaaaagatcaaaggatcttcttgagatcctttttttctgcgcgtaatctgctgcttgcaaacaaaaaaaccaccgctaccagcggtggtttgtttgccggatcaagagctaccaactctttttccgaaggtaactggcttcagcagagcgcagataccaaatactgtccttctagtgtagccgtagttaggccaccacttcaagaactctgtagcaccgcctacatacctcgctctgctaatcctgttaccagtggctgctgccagtggcgataagtcgtgtcttaccgggttggactcaagacgatagttaccggataaggcgcagcggtcgggctgaacggggggttcgtgcacacagcccagcttggagcgaacgacctacaccgaactgagatacctacagcgtgagctatgagaaagcgccacgcttcccgaagggagaaaggcggacaggtatccggtaagcggcagggtcggaacaggagagcgcacgagggagcttccagggggaaacgcctggtatctttatagtcctgtcgggtttcgccacctctgacttgagcgtcgatttttgtgatgctcgtcaggggggcggagcctatggaaaaacgccagcaacgcggcctttttacggttcctggccttttgctggccttttgctcacatgttctttcctgcgttatcccctgattctgtggataaccgtattaccgcctttgagtgagctgataccgctcgccgcagccgaacgaccgagcgcagcgagtcagtgagcgaggaagcggaagagcgcccaatacgcaaaccgcctctccccgcgcgttggccgattcattaatgcagctggcacgacaggtttcccgactggaaagcgggcagtgagcgcaacgcaattaatgtgagttagctcactcattaggcaccccaggctttacactttatgcttccggctcgtatgttgtgtggaattgtgagcggataacaatttcacacaggaaacagctatgaccatgattacgccaagcttgcatgcctgcaggtcgactcgacgtacgatcccacatgcaagtttttatttcaatcccttttcctttgaataactgaccaagaacaacaagaaaaaaaaaaaaaaagaaaaggatcattttgaaaggatatttttcgctcctattcaaatactgtatttttaccaaaaaaactgtatttttcctacactctcaagctttgtttttcgcttcgactctcatgatttccttcatatgccaatcactctatttataaatggcataaggtagtgtgaacaattgcaaagcttgtcatcaaaagcttgcaatgtacaaattaatgtttttcatgcctttcaaaattatctgcaccccctagctattaatctaacatctaagtaaggctagtgaattttttcgaatagtcatgcagtgcattaatttccccgtgactattttggctttgactccaacactggccccgtacatccgtccctcattacatgaaaagaaatattgtttatattcttaattaaaaatattgtcccttctaaattttcatatagttaattattatattacttttttctctattctattagttctattttcaaattattatttatgcatatgtaaagtacattatatttttgctatatacttaaatatttctaaattattaaaaaaagactgatatgaaaaatttattctttttaaagctatatcattttatatatactttttcttttcttttctttcattttctattcaatttaataagaaataaattttgtaaatttttatttatcaatttataaaaatattttactttatatgttttttcacatttttgttaaacaaatcatatcattatgattgaaagagaggaaattgacagtgagtaataagtgatgagaaaaaaatgtgttatttcctaaaaaaaacctaaacaaacatgtatctactctctatttcatctatctctcatttcatttttctctttatctctttctttatttttttatcatatcatttcacattaattatttttactctctttattttttctctctatccctctcttatttccactcatatatacactccaaaattggggcatgcctttatcactactctatctcctccactaaatcatttaaatgaaactgaaaagcattggcaagtctcctcccctcctcaagtgatttccaactcagcattggcatctaattgattcagtatatctattgcatgtgtaaaagtctttccacaatacataactattaattaatcttaaataaataaaggataaaatatttttttttcttcataaaattaaaatatgttattttttgtttagatgtatattcgaataaatctaaatatatgataatgattttttatattgattaaacatataatcaatattaaatatgatatttttttatataggttgtacacataattttataaggataaaaaatatgataaaaataaattttaaatatttttatatttacgagaaaaaaaaatattttagccataaataaatgaccagcatattttacaaccttagtaattcataaattcctatatgtatatttgaaattaaaaacagataatcgttaagggaaggaatcctacgtcatctcttgccatttgtttttcatgcaaacagaaagggacgaaaaaccacctcaccatgaatcactcttcacaccatttttactagcaaacaagtctcaacaactgaagccagctctctttccgtttctttttacaacactttctttgaaatagtagtatttttttttcacatgatttattaacgtgccaaaagatgcttattgaatagagtgcacatttgtaatgtactactaattagaacatgaaaaagcattgttctaacacgataatcctgtgaaggcgttaactccaaagatccaatttcactatataaattgtgacgaaagcaaaatgaattcacatagctgagagagaaaggaaaggttaactaagaagcaatacttcagcggccggccgcccccttcaccatgaatggcattgggaaactcaaatcgtcgagttctgaattggaccttcacattgaagattacctaccttctggatccagtgttcaacaagaacggcatggcaagctccgactgtgtgatttgctagacatttctcctagtctatctgaggcagcacgtgccattgtagatgatacattcacaaggtgcttcaagtcaaatcctccagaaccttggaactggaatgtttatttgtttcctttgtggtgctgtggagttgtggttcgatatttgattttgttccctattaggattctagtgttggcattaggatggattatatttctttcagccttcattccagtgcactccctcctgaaaggaaatgatgatttgaggaaaaagattgagaggtgtttggtggagatgatgtgcagtttctttgttgcatcatggactggggttgtcaagtaccatgggccaagacctagtatccgaccaaaacaggtttttgtggccaatcatacttccatgattgatttcattatcttagaacagatgactgcatttgctgttattatgcagaagcatcctggatgggttggattattgcagagcaccattttggagagtgtggggtgtatctggttcaatcgtacagaggcaaaggatcgagaaattgtggcaaggaaattgagggatcatgtcctgggagctaacaataaccctcttctcatatttcctgaaggaacttgtgtaaataatcactactctgtcatgttcaagaagggtgcatttgaacttggctgcacaatttgcccagttgcaatcaagtacaataaaattttcgtcgatgctttttggaatagtcgaaagcaatcattcaccactcatctcttgcaattaatgacatcttgggctgtagtttgtgatgtttggtacttggagccacaaaatttgaagccaggagagacacccattgaatttgcagagagagttagagacataatctcacatcgtgctgggcttaaaaaggttccttgggatggatatctgaagtattctcgccctagtcccaagcacagagaaggaaagcaacaaatattcgctgagtctgtgttgcggcgctttgaggaaaaataatgaagggtgggcgcgggccgcatgagccgtaaaggttcaatacaacgagtgcttgttttcttagggacaagcattgtacttatgtatgattctgtgtaaccatgagtcttccacgttgtactaatgtgaagggcaaaaataaaacacagaacaagttcgtttttctcaaataatgtgaaggtagaaaatggaaccatgcctcctctcttgcatgtgatttaaaatattagcagatggtacc

SEQ ID NO: 171 - DNA, 8936 bp, Artificial Sequence
  plasmid pKR1364
  misc_feature (1192)..(1192): n is a, c, g, or t
ggtcgactcgacgtacgtcctcgaagagaagggttaataacacattttttaacatttttaacacaaattttagttatttaaaaatttattaaaaaatttaaaataagaagaggaactctttaaataaatctaacttacaaaatttatgatttttaataagttttcaccaataaaaaatgtcataaaaatatgttaaaaagtatattatcaatattctctttatgataaataaaaagaaaaaaaaaataaaagttaagtgaaaatgagattgaagtgactttaggtgtgtataaatatatcaaccccgccaacaatttatttaatccaaatatattgaagtatattattccatagcctttatttatttatatatttattatataaaagctttatttgttctaggttgttcatgaaatatttttttggttttatctccgttgtaagaaaatcatgtgctttgtgtcgccactcactattgcagctttttcatgcattggtcagattgacggttgattgtatttttgttttttatggttttgtgttatgacttaagtcttcatctctttatctcttcatcaggtttgatggttacctaatatggtccatgggtacatgcatggttaaattaggtggccaactttgttgtgaacgatagaattttttttatattaagtaaactatttttatattatgaaataataataaaaaaaatattttatcattattaacaaaatcatattagttaatttgttaactctataataaaagaaatactgtaacattcacattacatggtaacatctttccaccctttcatttgttttttgtttgatgactttttttcttgtttaaatttatttcccttcttttaaatttggaatacattatcatcatatataaactaaaatactaaaaacaggattacacaaatgataaataataacacaaatatttataaatctagctgcaatatatttaaactagctatatcgatattgtaaaataaaactagctgcattgatactgataaaaaaatatcatgtgctttctggactgatgatgcagtatacttttgacattgcctttattttatttttcagaaaagctttcttagttctgggttcttcattatttgtttcccatctccattgtgaattgaatcatttgcttcgtgtcacaaatacaatttagntaggtacatgcattggtcagattcacggtttattatgtcatgacttaagttcatggtagtacattacctgccacgcatgcattatattggttagatttgataggcaaatttggttgtcaacaatataaatataaataatgtttttatattacgaaataacagtgatcaaaacaaacagttttatctttattaacaagattttgtttttgtttgatgacgttttttaatgtttacgctttcccccttcttttgaatttagaacactttatcatcataaaatcaaatactaaaaaaattacatatttcataaataataacacaaatatttttaaaaaatctgaaataataatgaacaatattacatattatcacgaaaattcattaataaaaatattatataaataaaatgtaatagtagttatatgtaggaaaaaagtactgcacgcataatatatacaaaaagattaaaatgaactattataaataataacactaaattaatggtgaatcatatcaaaataatgaaaaagtaaataaaatttgtaattaacttctatatgtattacacacacaaataataaataatagtaaaaaaaattatgataaatatttaccatctcataagatatttaaaataatgataaaaatatagattattttttatgcaactagctagccaaaaagagaacacgggtatatataaaaagagtacctttaaattctactgtacttcctttattcctgacgtttttatatcaagtggacatacgtgaagattttaattatcagtctaaatatttcattagcacttaatacttttctgttttattcctatcctataagtagtcccgattctcccaacattgcttattcacacaactaactaagaaagtcttccatagccccccaagcggccgcaaaccatggcttccgccgaattcaccgccgctgccgactctgtgcagaagcttcccaagactccttccgacgacgagcttcttgagctctacggactgtacaagcaggccaccgtcggcgacaacaacaccgaccgacccggcgccttcaacttcaaggccaagtacaagtgggacgcctgggacaagctcaagggcaagtctcaggaggaggctgagcaggagtacattgctcttgtccagaccctttccgacaagtacaactaagcggccgcgacacaagtgtgagagtactaaataaatgctttggttgtacgaaatcattacactaaataaaataatcaaagcttatatatgccttccgctaaggccgaatgcaaagaaattggttctttctcgttatcttttgccacttttactagtacgtattaattactacttaatcatctttgtttacggctcattatatccggtctagaggatccaaggccgcgaagttaaaagcaatgttgtcacttgtcgtactaacacatgatgtgatagtttatgctagctagctataacataagctgtctctgagtgtgttgtatattaataaagatcatcactggtgaatggtgatcgtgtacgtaccctacttagtaggcaatggaagcacttagagtgtgctttgtgcatggccttgcctctgttttgagacttttgtaatgttttcgagtttaaatctttgcctttgcgtacgtgggcggatcccccgggctgcaggaattcactggccgtcgttttacaacgtcgtgactgggaaaaccctggcgttacccaacttaatcgccttgcagcacatccccctttcgccagctggcgtaatagcgaagaggcccgcaccgatcgcccttcccaacagttgcgcagcctgaatggcgaatggcgcctgatgcggtattttctccttacgcatctgtgcggtatttcacaccgcatatggtgcactctcagtacaatctgctctgatgccgcatagttaagccagccccgacacccgccaacacccgctgacgcgccctgacgggcttgtctgctcccggcatccgcttacagacaagctgtgaccgtctccgggagctgcatgtgtcagaggttttcaccgtcatcaccgaaacgcgcgagacgaaagggcctcgtgatacgcctatttttataggttaatgtcatgataataatggtttcttagacgtcaggtggcacttttcggggaaatgtgcgcggaacccctatttgtttatttttctaaatacattcaaatatgtatccgctcatgagacaataaccctgataaatgcttcaataatattgaaaaaggaagagtatgagtattcaacatttccgtgtcgcccttattcccttttttgcggcattttgccttcctgtttttgctcacccagaaacgctggtgaaagtaaaagatgctgaagatcagttgggtgcacgagtgggttacatcgaactggatctcaacagcggtaagatccttgagagttttcgccccgaagaacgttttccaatgatgagcacttttaaagttctgctatgtggcgcggtattatcccgtattgacgccgggcaagagcaactcggtcgccgcatacactattctcagaatgacttggttgagtactcaccagtcacagaaaagcatcttacggatggcatgacagtaagagaattatgcagtgctgccataaccatgagtgataacactgcggccaacttacttctgacaacgatcggaggaccgaaggagctaaccgcttttttgcacaacatgggggatcatgtaactcgccttgatcgttgggaaccggagctgaatgaagccataccaaacgacgagcgtgacaccacgatgcctgtagcaatggcaacaacgttgcgcaaactattaactggcgaactacttactctagcttcccggcaacaattaatagactggatggaggcggataaagttgcaggaccacttctgcgctcggcccttccggctggctggtttattgctgataaatctggagccggtgagcgtgggtctcgcggtatcattgcagcactggggccagatggtaagccctcccgtatcgtagttatctacacgacggggagtcaggcaactatggatgaacgaaatagacagatcgctgagataggtgcctcactgattaagcattggtaactgtcagaccaagtttactcatatatactttagattgatttaaaacttcatttttaatttaaaaggatctaggtgaagatcctttttgataatctcatgaccaaaatcccttaacgtgagttttcgttccactgagcgtcagaccccgtagaaaagatcaaaggatcttcttgagatcctttttttctgcgcgtaatctgctgcttgcaaacaaaaaaaccaccgctaccagcggtggtttgtttgccggatcaagagctaccaactctttttccgaaggtaactggcttcagcagagcgcagataccaaatactgtccttctagtgtagccgtagttaggccaccacttcaagaactctgtagcaccgcctacatacctcgctctgctaatcctgttaccagtggctgctgccagtggcgataagtcgtgtcttaccgggttggactcaagacgatagttaccggataaggcgcagcggtcgggctgaacggggggttcgtgcacacagcccagcttggagcgaacgacctacaccgaactgagatacctacagcgtgagctatgagaaagcgccacgcttcccgaagggagaaaggcggacaggtatccggtaagcggcagggtcggaacaggagagcgcacgagggagcttccagggggaaacgcctggtatctttatagtcctgtcgggtttcgccacctctgacttgagcgtcgatttttgtgatgctcgtcaggggggcggagcctatggaaaaacgccagcaacgcggcctttttacggttcctggccttttgctggccttttgctcacatgttctttcctgcgttatcccctgattctgtggataaccgtattaccgcctttgagtgagctgataccgctcgccgcagccgaacgaccgagcgcagcgagtcagtgagcgaggaagcggaagagcgcccaatacgcaaaccgcctctccccgcgcgttggccgattcattaatgcagctggcacgacaggtttcccgactggaaagcgggcagtgagcgcaacgcaattaatgtgagttagctcactcattaggcaccccaggctttacactttatgcttccggctcgtatgttgtgtggaattgtgagcggataacaatttcacacaggaaacagctatgaccatgattacgccaagcttgcatgcctgcagcccgggggatccgcccacgtacggtaccatctgctaatattttaaatcacatgcaagagaggaggcatggttccattttctaccttcacattatttgagaaaaacgaacttgttctgtgttttatttttgcccttcacattagtacaacgtggaagactcatggttacacagaatcatacataagtacaatgcttgtccctaagaaaacaagcactcgttgtattgaacctttacggctcatgcggcccgcgcccacccttcattatttttcctcaaagcgccgcaacacagactcagcgaatatttgttgctttccttctctgtgcttgggactagggcgagaatacttcagatatccatcccaaggaacctttttaagcccagcacgatgtgagattatgtctctaactctctctgcaaattcaatgggtgtctctcctggcttcaaattttgtggctccaagtaccaaacatcacaaactacagcccaagatgtcattaattgcaagagatgagtggtgaatgattgctttcgactattccaaaaagcatcgacgaaaattttattgtacttgattgcaactgggcaaattgtgcagccaagttcaaatgcacccttcttgaacatgacagagtagtgattatttacacaagttccttcaggaaatatgagaagagggttattgttagctcccaggacatgatccctcaatttccttgccacaatttctcgatcctttgcctctgtacgattgaaccagatacaccccacactctccaaaatggtgctctgcaataatccaacccatccaggatgcttctgcataataacagcaaatgcagtcatctgttctaagataatgaaatcaatcatggaagtatgattggccacaaaaacctgttttggtcggatactaggtcttggcccatggtacttgacaaccccagtccatgatgcaacaaagaaactgcacatcatctccaccaaacacctctcaatctttttcctcaaatcatcatttcctttcaggagggagtgcactggaatgaaggctgaaagaaatataatccatcctaatgccaacactagaatcctaatagggaacaaaatcaaatatcgaaccacaactccacagcaccacaaaggaaacaaataaacattccagttccaaggttctggaggatttgacttgaagcaccttgtgaatgtatcatctacaatggcacgtgctgcctcagatagactaggagaaatgtctagcaaatcacacagtcggagcttgccatgccgttcttgttgaacactggatccagaaggtaggtaatcttcaatgtgaaggtccaattcagaactcgacgatttgagtttcccaatgccattcatggtgaagggggcggccggccgctgaagtattgcttcttagttaacctttcctttctctctcagctatgtgaattcattttgctttcgtcacaatttatatagtgaaattggatctttggagttaacgccttcacaggattatcgtgttagaacaatgctttttcatgttctaattagtagtacattacaaatgtgcactctattcaataagcatcttttggcacgttaataaatcatgtgaaaaaaaaatactactatttcaaagaaagtgttgtaaaaagaaacggaaagagagctggcttcagttgttgagacttgtttgctagtaaaaatggtgtgaagagtgattcatggtgaggtggtttttcgtccctttctgtttgcatgaaaaacaaatggcaagagatgacgtaggattccttcccttaacgattatctgtttttaatttcaaatatacatataggaatttatgaattactaaggttgtaaaatatgctggtcatttatttatggctaaaatatttttttttctcgtaaatataaaaatatttaaaatttatttttatcatattttttatccttataaaattatgtgtacaacctatataaaaaaatatcatatttaatattgattatatgtttaatcaatataaaaaatcattatcatatatttagatttattcgaatatacatctaaacaaaaaataacatattttaattttatgaagaaaaaaaaatattttatcctttatttatttaagattaattaatagttatgtattgtggaaagacttttacacatgcaatagatatactgaatcaattagatgccaatgctgagttggaaatcacttgaggaggggaggagacttgccaatgcttttcagtttcatttaaatgatttagtggaggagatagagtagtgataaaggcatgccccaattttggagtgtatatatgagtggaaataagagagggatagagagaaaaaataaagagagtaaaaataattaatgtgaaatgatatgataaaaaaataaagaaagagataaagagaaaaatgaaatgagagatagatgaaatagagagtagatacatgtttgtttaggttttttttaggaaataacacatttttttctcatcacttattactcactgtcaatttcctctctttcaatcataatgatatgatttgtttaacaaaaatgtgaaaaaacatataaagtaaaatatttttataaattgataaataaaaatttacaaaatttatttcttattaaattgaatagaaaatgaaagaaaagaaaagaaaaagtatatataaaatgatatagctttaaaaagaataaatttttcatatcagtctttttttaataatttagaaatatttaagtatatagcaaaaatataatgtactttacatatgcataaataataatttgaaaatagaactaatagaatagagaaaaaagtaatataataattaactatatgaaaatttagaagggacaatatttttaattaagaatataaacaatatttcttttcatgtaatgagggacggatgtacggggccagtgttggagtcaaagccaaaatagtcacggggaaattaatgcactgcatgactattcgaaaaaattcactagccttacttagatgttagattaatagctagggggtgcagataattttgaaaggcatgaaaaacattaatttgtacattgcaagcttttgatgacaagctttgcaattgttcacactaccttatgccatttataaatagagtgattggcatatgaaggaaatcatgagagtcgaagcgaaaaacaaagcttgagagtgtaggaaaaatacagtttttttggtaaaaatacagtatttgaataggagcgaaaaatatcctttcaaaatgatccttttctttttttttttttttcttgttgttcttggtcagttattcaaaggaaaagggattgaaataaaaacttgcatgtgggatcgtacgtcgagtcgacctgca

SEQ ID NO: 172 - DNA, 30 bp, Artificial Sequence
  primer YL LPAAT1 fwd
gatgatccatggtggtcgtggacgatgttc

SEQ ID NO: 173 - DNA, 38 bp, Artificial Sequence
  primer YL LPAAT1 rev
gatcgagcggccgctgcagttagttagtatcacttatc

SEQ ID NO: 174 - DNA, 29 bp, Artificial Sequence
  primer YL LPAAT2 fwd
acgtccatggccgttgcatccaagctcgt

SEQ ID NO: 175 - DNA, 35 bp, Artificial Sequence
  primer YL LPAAT2 rev
acgtgcggccgcctactgagtcttctggccagcgt

SEQ ID NO: 176 - DNA, 32 bp, Artificial Sequence
  primer YL LPAAT3 fwd
gaagatccatggctactgcagaggctgtcaag

SEQ ID NO: 177 - DNA, 38 bp, Artificial Sequence
  primer YL LPAAT3 rev
gaagatcgcggccgccttactaacaacttcagatcgtc

SEQ ID NO: 178 - DNA, 43 bp, Artificial Sequence
  primer YL ACBP fwd
gatcaaccatggcttccgccgaattcaccgccgctgccgactc

SEQ ID NO: 179 - DNA, 35 bp, Artificial Sequence
  primer YL ACBP rev
gatcaagcggccgcttagttgtacttgtcggaaag

SEQ ID NO: 180 - DNA, 7043 bp, Artificial Sequence
  plasmid pYAT MOD1
tcgacataagtttgcaaaaagatcgtatttaaatagttggagcaagggagaaatgtagagtgtgaaagactcactatggtccgggcttatctcgaccaatagccaaagtctggagtttctgagagaaaaaggcaagatacgtatgtaacaaagcgacgcatggtacaataataccggaggcatgtatcatagagagttagtggttcgatgatggcactggtgcctggtatgactttatacggctgactacatatttgtcctcagacatacaattacagtcaagcacttacccttggacatctgtaggtaccccccggccaagacgatctcagcgtgtcgtatgtcggattggcgtagctccctcgctcgtcaattggctcccatctactttcttctgcttggctacacccagcatgtctgctatggctcgttttcgtgccttatctatcctcccagtattaccaactctaaatgacatgatgtgattgggtctacactttcatatcagagataaggagtagcacagttgcataaaaagcccaactctaatcagcttcttcctttcttgtaattagtacaaaggtgattagcgaaatctggaagcttagttggccctaaaaaaatcaaaaaaagcaaaaaacgaaaaacgaaaaaccacagttttgagaacagggaggtaacgaaggatcgtatatatatatatatatatatatacccacggatcccgagaccggcctttgattcttccctacaaccaaccattctcaccaccctaattcacaaccatggatccaggcctgttaacggccattacggcctgcaggatccgaaaaaacctcccacacctccccctgaacctgaaacataaaatgaatgcaattgttgttgttaacttgtttattgcagcttataatggttacaaataaagcaatagcatcacaaatttcacaaataaagcatttttttcactgcattctagttgtggtttgtccaaactcatcaatgtatcttatcatgtctgcggccgcaagtgtggatggggaagtgagtgcccggttctgtgtgcacaattggcaatccaagatggatggattcaacacagggatatagcgagctacgtggtggtgcgaggatatagcaacggatatttatgtttgacacttgagaatgtacgatacaagcactgtccaagtacaatactaaacatactgtacatactcatactcgtacccgggcaacggtttcacttgagtgcagtggctagtgctcttactcgtacagtgtgcaatactgcgtatcatagtctttgatgtatatcgtattcattcatgttagttgcgtacgagccggaagcataaagtgtaaagcctggggtgcctaatgagtgagctaactcacattaattgcgttgcgctcactgcccgctttccagtcgggaaacctgtcgtgccagctgcattaatgaatcggccaacgcgcggggagaggcggtttgcgtattgggcgctcttccgcttcctcgctcactgactcgctgcgctcggtcgttcggctgcggcgagcggtatcagctcactcaaaggcggtaatacggttatccacagaatcaggggataacgcaggaaagaacatgtgagcaaaaggccagcaaaaggccaggaaccgtaaaaaggccgcgttgctggcgtttttccataggctccgcccccctgacgagcatcacaaaaatcgacgctcaagtcagaggtggcgaaacccgacaggactataaagataccaggcgtttccccctggaagctccctcgtgcgctctcctgttccgaccctgccgcttaccggatacctgtccgcctttctcccttcgggaagcgtggcgctttctcatagctcacgctgtaggtatctcagttcggtgtaggtcgttcgctccaagctgggctgtgtgcacgaaccccccgttcagcccgaccgctgcgccttatccggtaactatcgtcttgagtccaacccggtaagacacgacttatcgccactggcagcagccactggtaacaggattagcagagcgaggtatgtaggcggtgctacagagttcttgaagtggtggcctaactacggctacactagaaggacagtatttggtatctgcgctctgctgaagccagttaccttcggaaaaagagttggtagctcttgatccggcaaacaaaccaccgctggtagcggtggtttttttgtttgcaagcagcagattacgcgcagaaaaaaaggatctcaagaagatcctttgatcttttctacggggtctgacgctcagtggaacgaaaactcacgttaagggattttggtcatgagattatcaaaaaggatcttcacctagatccttttaaattaaaaatgaagttttaaatcaatctaaagtatatatgagtaaacttggtctgacagttaccaatgcttaatcagtgaggcacctatctcagcgatctgtctatttcgttcatccatagttgcctgactccccgtcgtgtagataactacgatacgggagggcttaccatctggccccagtgctgcaatgataccgcgagacccacgctcaccggctccagatttatcagcaataaaccagccagccggaagggccgagcgcagaagtggtcctgcaactttatccgcctccatccagtctattaattgttgccgggaagctagagtaagtagttcgccagttaatagtttgcgcaacgttgttgccattgctacaggcatcgtggtgtcacgctcgtcgtttggtatggcttcattcagctccggttcccaacgatcaaggcgagttacatgatcccccatgttgtgcaaaaaagcggttagctccttcggtcctccgatcgttgtcagaagtaagttggccgcagtgttatcactcatggttatggcagcactgcataattctcttactgtcatgccatccgtaagatgcttttctgtgactggtgagtactcaaccaagtcattctgagaatagtgtatgcggcgaccgagttgctcttgcccggcgtcaatacgggataataccgcgccacatagcagaactttaaaagtgctcatcattggaaaacgttcttcggggcgaaaactctcaaggatcttaccgctgttgagatccagttcgatgtaacccactcgtgcacccaactgatcttcagcatcttttactttcaccagcgtttctgggtgagcaaaaacaggaaggcaaaatgccgcaaaaaagggaataagggcgacacggaaatgttgaatactcatactcttcctttttcaatattattgaagcatttatcagggttattgtctcatgagcggatacatatttgaatgtatttagaaaaataaacaaataggggttccgcgcacatttccccgaaaagtgccacctgacgcgccctgtagcggcgcattaagcgcggcgggtgtggtggttacgcgcagcgtgaccgctacacttgccagcgccctagcgcccgctcctttcgctttcttcccttcctttctcgccacgttcgccggctttccccgtcaagctctaaatcgggggctccctttagggttccgatttagtgctttacggcacctcgaccccaaaaaacttgattagggtgatggttcacgtagtgggccatcgccctgatagacggtttttcgccctttgacgttggagtccacgttctttaatagtggactcttgttccaaactggaacaacactcaaccctatctcggtctattcttttgatttataagggattttgccgatttcggcctattggttaaaaaatgagctgatttaacaaaaatttaacgcgaattttaacaaaatattaacgcttacaatttccattcgccattcaggctgcgcaactgttgggaagggcgatcggtgcgggcctcttcgctattacgccagctggcgaaagggggatgtgctgcaaggcgattaagttgggtaacgccagggttttcccagtcacgacgttgtaaaacgacggccagtgaattgtaatacgactcactatagggcgaattgggtaccgggccccccctcgaggtcgatggtgtcgataagcttgatatcgaattcatgtcacacaaaccgatcttcgcctcaaggaaacctaattctacatccgagagactgccgagatccagtctacactgattaattttcgggccaataatttaaaaaaatcgtgttatataatattatatgtattatatatatacatcatgatgatactgacagtcatgtcccattgctaaatagacagactccatctgccgcctccaactgatgttctcaatatttaaggggtcatctcgcattgtttaataataaacagactccatctaccgcctccaaatgatgttctcaaaatatattgtatgaacttatttttattacttagtattattagacaacttacttgctttatgaaaaacacttcctatttaggaaacaatttataatggcagttcgttcatttaacaatttatgtagaataaatgttataaatgcgtatgggaaatcttaaatatggatagcataaatgatatctgcattgcctaattcgaaatcaacagcaacgaaaaaaatcccttgtacaacataaatagtcatcgagaaatatcaactatcaaagaacagctattcacacgttactattgagattattattggacgagaatcacacactcaactgtctttctctcttctagaaatacaggtacaagtatgtactattctcattgttcatacttctagtcatttcatcccacatattccttggatttctctccaatgaatgacattctatcttgcaaattcaacaattataataagatataccaaagtagcggtatagtggcaatcaaaaagcttctctggtgtgcttctcgtatttatttttattctaatgatccattaaaggtatatatttatttcttgttatataatccttttgtttattacatgggctggatacataaaggtattttgatttaattttttgcttaaattcaatcccccctcgttcagtgtcaactgtaatggtaggaaattaccatacttttgaagaagcaaaaaaaatgaaagaaaaaaaaaatcgtatttccaggttagacgttccgcagaatctagaatgcggtatgcggtacattgttcttcgaacgtaaaagttgcgctccctgagatattgtacatttttgcttttacaagtacaagtacatcgtacaactatgtactactgttgatgcatccacaacagtttgttttgtttttttttgttttttttttttctaatgattcattaccgctatgtatacctacttgtacttgtagtaagccgggttattggcgttcaattaatcatagacttatgaatctgcacggtgtgcgctgcgagttacttttagcttatgcatgctacttgggtgtaatattgggatctgttcggaaatcaacggatgctcaatcgatttcgacagtaattaattaagtcatacacaagtcagctttcttcgagcctcatataagtataagtagttcaacgtattagcactgtacccagcatctccgtatcgagaaacacaacaacatgccccattggacagatcatgcggatacacaggttgtgcagtatcatacatactcgatcagacaggtcgtctgaccatcatacaagctgaacaagcgctccatacttgcacgctctctatatacacagttaaattacatatccatagtctaacctctaacagttaatcttctggtaagcctcccagccagccttctggtatcgcttggcctcctcaataggatctcggttctggccgtacagacctcggccgacaattatgatatccgttccggtagacatgacatcctcaacagttcggtactgctgtccgagagcgtctcccttgtcgtcaagacccaccccgggggtcagaataagccagtcctcagagtcgcccttaggtcggttctgggcaatgaagccaaccacaaactcggggtcggatcgggcaagctcaatggtctgcttggagtactcgccagtggccagagagcccttgcaagacagctcggccagcatgagcagacctctggccagcttctcgttgggagaggggactaggaactccttgtactgggagttctcgtagtcagagacgtcctccttcttctgttcagagacagtttcctcggcaccagctcgcaggccagcaatgattccggttccgggtacaccgtgggcgttggtgatatcggaccactcggcgattcggtgacaccggtactggtgcttgacagtgttgccaatatctgcgaactttctgtcctcgaacaggaagaaaccgtgcttaagagcaagttccttgagggggagcacagtgccggcgtaggtgaagtcgtcaatgatgtcgatatgggttttgatcatgcacacataaggtccgaccttatcggcaagctcaatgagctccttggtggtggtaacatccagagaagcacacaggttggttttcttggctgccacgagcttgagcactcgagcggcaaaggcggacttgtggacgttagctcgagcttcgtaggagggcattttggtggtgaagaggagactgaaataaatttagtctgcagaactttttatcggaaccttatctggggcagtgaagtatatgttatggtaatagttacgagttagttgaacttatagatagactggactatacggctatcggtccaaattagaaagaacgtcaatggctctctgggcgtcgcctttgccgacaaaaatgtgatcatgatgaaagccagcaatgacgttgcagctgatattgttgtcggccaaccgcgccgaaaacgcagctgtcagacccacagcctccaacgaagaatgtatcgtcaaagtgatccaagcacactcatagttggagtcgtactccaaaggcggcaatgacgagtcagacagatactcg

SEQ ID NO: 181 - DNA, 261 bp, Yarrowia lipolytica
atggcttccgccgaattcaccgccgctgccgactctgtgcagaagcttcccaagactccttccgacgacgagcttcttgagctctacggactgtacaagcaggccaccgtcggcgacaacaacaccgaccgacccggcgccttcaacttcaaggccaagtacaagtgggacgcctgggacaagctcaagggcaagtctcaggaggaggctgagcaggagtacattgctcttgtccagaccctttccgacaagtacaactaa

SEQ ID NO: 182 - protein, 86 aa, Yarrowia lipolytica
MASAEFTAAADSVQKLPKTPSDDELLELYGLYKQATVGDNNTDRPGAFNFKAKYKWDAWDKLKGKSQEEAEQEYIALVQTLSDKYN

SEQ ID NO: 183 - DNA, 28 bp, Artificial Sequence
  primer YL CPT fwd
acgtccatgggcgtattcattaaacagg

SEQ ID NO: 184 - DNA, 33 bp, Artificial Sequence
  primer YL CPT rev
acgtgcggccgcttattcggtcttcttctcctg

SEQ ID NO: 185 - DNA, 672 bp, Yarrowia lipolytica
atggtggtcgtggacgatgttctcggtaatcatctatcaagatacgactatatgatctacgcactaatcaacaaccagcattgcgccaagtcgcaccttgcattcctgtcctggaaacacatcttttctctctttagcctcagcaagattctgcccttctaccgacttgacgaaaactggatgttcgaatcagcagccgaccttgagaaagaactagccaagctaatcaacccttactgtctggtgctgttcccagaagtctcggtggcaaccccacaacttatcagacgacatagagagctctgcagagcgtgttttgcacctgaactcactcatgtactctaccctcgccacagcagctttgcagacttcatattgggactgaataagggccaggctcttagttacatctacgacgccaccatctcgtatactgacaagaaagataagattctatgtaatcctggaaacatagatactctgttgactcaagtggaaacggttcatgttcacatacaccgagaacagtatcgtcggctgccgcgccacagacgtggtattcagaagtggctggaaaacacatgggtccacaaggataagagtatcagaaaggcctacaagcagtctggatcaatcatggatgatggcaagctcaaggagaaggataagtga

SEQ ID NO: 186 - protein, 223 aa, Yarrowia lipolytica
MVVVDDVLGNHLSRYDYMIYALINNQHCAKSHLAFLSWKHIFSLFSLSKILPFYRLDENWMFESAADLEKELAKLINPYCLVLFPEVSVATPQLIRRHRELCRACFAPELTHVLYPRHSSFADFILGLNKGQALSYIYDATISYTDKKDKILCNPGNIDTLLTQVETVHVHIHREQYRRLPRHRRGIQKWLENTWVHKDKSIRKAYKQSGSIMDDGKLKEKDK

SEQ ID NO: 187 - DNA, 849 bp, Yarrowia lipolytica
atggccgttgcatccaagctcgtcttctacgtccgcgccgccatcgccgtggtcatctttgccgcctgtgccacctacggcgtgctggcgtccaccattctcaccgccatcggcaagcagggcctggcccaatggaccgttgccagagccttctactactcggtgcgcatcttcctgggtatcagcatcaagctgcgtagccggcaggtgaccggaaccgccggtctggatgcctccaagatccaggtcgccaacaccaccaagcccattgacgacatcaccaaacacctgccccgaccatgcattctgatttccaaccaccagaacgaaatggacattctggtgctcggtcgcatcttcccccagtactgctccgtcaccgccaaaaaggccctcaagtggtaccctctgctgggccagttcatggcgctgtccggcaccatcttcctggaccgaaaggaccgaaccaagtccgtgcagaccctcggcggcgccgtcaagaccatccagagcggcaacggaggcaagggccagagcgtcttcatgttccccgagggaacccgatcctactccaaggacgtcggcatcatgcccttcaagaagggctgtttccacctggcggtccagtcgggcgctcccattgtccccgtggtggtccagaacacctcccgaatgttttctttcggccgaggcaagctggacgccggagagatccttgtcgacgtcctgagccccattgagaccaagggtctggacgccagcaacgtcgacgctctcatggccaccacttataaggccatgtgcgagactgccgaccagattggctacgctggccagaagactcagtag

SEQ ID NO: 188 - protein, 282 aa, Yarrowia lipolytica
MAVASKLVFYVRAAIAVVIFAACATYGVLASTILTAIGKQGLAQWTVARAFYYSVRIFLGISIKLRSRQVTGTAGLDASKIQVANTTKPIDDITKHLPRPCILISNHQNEMDILVLGRIFPQYCSVTAKKALKWYPLLGQFMALSGTIFLDRKDRTKSVQTLGGAVKTIQSGNGGKGQSVFMFPEGTRSYSKDVGIMPFKKGCFHLAVQSGAPIVPVVVQNTSRMFSFGRGKLDAGEILVDVLSPIETKGLDASNVDALMATTYKAMCETADQIGYAGQKTQ

SEQ ID NO: 189 - DNA, 1230 bp, Yarrowia lipolytica
atggctactgcagaggctgtcaaggcctccggtgtggctggagagtcctcttctgcctcccagcgagtagcaaaatccgccccgtccacggaccccgtcattcctgtcgatattcctctggcagtccccaccaccaacaaggagctccctcctcctcgacactccaagccttcccaggtgcttcgaggtgtcattgctgttttttactttctgtgcgcctgcttatcgattgtactgactcaatggatcggctacccactcaaataccagtccaaaatggcctgggtggtctgggtagagtacaccaaacaacagttcatcgtggtgatgctgtgtcttgttcaggcactcactagcacagaaatgcgagtttcaggtgacgagactatgaagggtgtcttctccgtcgacggaaacggctacctgtcttccagattcgaagaaagagccattgtcatcgccaaccaccagctctatacagactggatctatctgtggtggtttgctctcaccagcggatttggcggttgcatctacatcctgctcaaaaagtctcttcgaagcattcccattttgggctcgggaatggccaattacaacttcatcttcctgtctcggaaatgggccgacgacgagcagaacatgaaggagcacttccagggtctcaacaagctgcaggcccccgtctggctcacaatgttccccgagggaacaaatacctcccacaatggtactaacaactccaacaagtttgctgctaagatcggagtcaagcccatgaagcatgtcttgttgccccgaactacaggtctgcggtttgccattgagaatctggctcaaactgtagactacctgtacgattgtactcttgcctacgaaggtgtgggccgaggagagtacggacaggacttttacacgcttggaaacgtgtttctgagaggccagggccctgtctatgtcaaagctcactggaccaagtttgtcatcaaggaaattccctacaaggacgaaaagaagtttgaaaagtggctgtatgatctgtggtacgacaaggaccagatgatggacaacttcattgagactggaaagtttttccctgataacgaggagtctgagaagattgccaagttgcagctggcccaccctttgcagggattgcaggtctttgtcattcctgctgctgctgcattgattttgagattgggatggaagtattggcagacgatctga

SEQ ID NO: 190 - protein, 409 aa, Yarrowia lipolytica
MATAEAVKASGVAGESSSASQRVAKSAPSTDPVIPVDIPLAVPTTNKELPPPRHSKPSQVLRGVIAVFYFLCACLSIVLTQWIGYPLKYQSKMAWVVWVEYTKQQFIVVMLCLVQALTSTEMRVSGDETMKGVFSVDGNGYLSSRFEERAIVIANHQLYTDWIYLWWFALTSGFGGCIYILLKKSLRSIPILGSGMANYNFIFLSRKWADDEQNMKEHFQGLNKLQAPVWLTMFPEGTNTSHNGTNNSNKFAAKIGVKPMKHVLLPRTTGLRFAIENLAQTVDYLYDCTLAYEGVGRGEYGQDFYTLGNVFLRGQGPVYVKAHWTKFVIKEIPYKDEKKFEKWLYDLWYDKDQMMDNFIETGKFFPDNEESEKIAKLQLAHPLQGLQVFVIPAAAALILRLGWKYWQTI

SEQ ID NO: 191 - DNA, 1944 bp, Yarrowia lipolytica
atgacacaacctgtgaatcggaaggcgactgtcgagcgggtcgagccagcagtggaggtggctgactccgagtccgaggccaagaccgacgtccacgttcaccaccatcatcaccaccacaagcgaaaatccgtcaagggcaagattctcaacttcttcacccgaagtcgacgtatcaccttcgtcctcggcgccgtggtcggtgtgatagccgcgggatactacgctgcgccaccggagctcagcattgatatcgatgctcttctcggcgacttgccctcgttcgactttgacgctctatctctcgacaacttgtccatggacagtgtgtcggactttgtacaagacatgaaatcgcggtttccgaccaagattctgcaggaggcggccaagatcgagaagcaccagaaaagcgaacagaaggctgccccttttgctgtgggcaaggctatgaagagcgagggactcaacgccaagtacccggtggtgctggtgcccggcgtcatctccacgggactggagagctggtccctggagggaaccgaggagtgtcccaccgagtcgcacttcagaaagcgaatgtggggctcctggtacatgatccgagtcatgctgctggacaagtactgctggctgcagaacctgatgctggacacagagaccggtctagaccctccccatttcaagctgcgagccgcccagggatttgcctccgccgacttctttatggcaggctactggctgtggaacaagctgctcgagaacctggctgttattggatacgatacggatacaatgtctgctgcggcgtacgactggagactgtcctaccctgatttggagcaccgagacggatacttctccaagctcaaagcttcaatcgaagagactaagcgtatgacaggtgagaagacagttctgacgggccattccatgggctcccaggtcatcttctacttcatgaagtgggctgaggccgagggatatggaggaggaggtcccaactgggtcaatgaccatattgaatcctttgtcgacatttccggctccatgctgggtactcccaagaccctggttgctcttctgtctggagaaatgaaggataccgtgcagctgaacgcgatggctgtgtatggactggagcagttcttctctcgacgagagcgagccgatctgctgcgaacatggggaggaattgcttccatgattcccaagggtggtaaggctatctggggtgatcattctggagcccctgatgacgagcccggccagaatgtcacctttggcaacttcatcaagttcaaggagtccttgaccgagtactctgctaagaacctcaccatggatgaaaccgttgacttcctgtattctcagtctcccgagtggtttgtgaaccgaaccgagggtgcttactcctttggaattgccaagactcgaaagcaggttgagcagaatgagaagcgaccttctacctggagcaaccctctggaagctgctctccccaatgcccccgatctcaagatctactgcttctatggagtcggtaaggataccgagcgagcctactactaccaggatgagcccaatcccgagcagaccaacttgaacgtcagtatcgctggaaacgaccctgatggtgtgcttatgggtcagggcgatggaaccgtctcccttgtgacccataccatgtgtcaccgatggaaggacgagaattccaagttcaaccctggtaacgcccaggtcaaggttgtggagatgttgcaccagcctgatcgacttgatattcgaggcggtgctcagactgccgagcatgtggacattctggggcgttctgagttgaacgagatggttctgaaggtggctagtggaaagggaaatgagattgaagagagagtcatctccaacattgatgagtgggtgtggaagattgatctcggcagcaat

SEQ ID NO: 192 - protein, 648 aa, Yarrowia lipolytica
MTQPVNRKATVERVEPAVEVADSESEAKTDVHVHHHHHHHKRKSVKGKILNFFTRSRRITFVLGAVVGVIAAGYYAAPPELSIDIDALLGDLPSFDFDALSLDNLSMDSVSDFVQDMKSRFPTKILQEAAKIEKHQKSEQKAAPFAVGKAMKSEGLNAKYPVVLVPGVISTGLESWSLEGTEECPTESHFRKRMWGSWYMIRVMLLDKYCWLQNLMLDTETGLDPPHFKLRAAQGFASADFFMAGYWLWNKLLENLAVIGYDTDTMSAAAYDWRLSYPDLEHRDGYFSKLKASIEETKRMTGEKTVLTGHSMGSQVIFYFMKWAEAEGYGGGGPNWVNDHIESFVDISGSMLGTPKTLVALLSGEMKDTVQLNAMAVYGLEQFFSRRERADLLRTWGGIASMIPKGGKAIWGDHSGAPDDEPGQNVTFGNFIKFKESLTEYSAKNLTMDETVDFLYSQSPEWFVNRTEGAYSFGIAKTRKQVEQNEKRPSTWSNPLEAALPNAPDLKIYCFYGVGKDTERAYYYQDEPNPEQTNLNVSIAGNDPDGVLMGQGDGTVSLVTHTMCHRWKDENSKFNPGNAQVKVVEMLHQPDRLDIRGGAQTAEHVDILGRSELNEMVLKVASGKGNEIEERVISNIDEWVWKIDLGSN

SEQ ID NO: 193 - DNA, 1185 bp, Yarrowia lipolytica
atgggcgtattcattaaacaggagcagcttccggctctcaagaagtacaagtactccgccgaggatcactcgttcatctccaacaacattctgcgccccttctggcgacagtttgtcaaaatcttccctctgtggatggcccccaacatggtgactctgctgggcttcttctttgtcattgtgaacttcatcaccatgctcattgttgatcccacccacgaccgcgagcctcccagatgggtctacctcacctacgctctgggtctgttcctttaccagacatttgatgcctgtgacggatcccatgcccgacgaactggccagagtggaccccttggagagctgtttgaccactgtgtcgacgccatgaatacctctctgattctcacggtggtggtgtccaccacccatatgggatataacatgaagctactgattgtgcagattgccgctctcggaaacttctacctgtcgacctgggagacctaccataccggaactctgtacctttctggcttctctggtcctgttgaaggtatcttgattctggtggctcttttcgtcctcaccttcttcactggtcccaacgtgtacgctctgaccgtctacgaggctcttcccgagtccatcacttcgctgctgcctgccagcttcctggacgtcaccatcacccagatctacattggattcggagtgctgggcatggtgttcaacatctacggcgcctgcggaaacgtgatcaagtactacaacaacaagggcaagagcgctctccccgccattctcggaatcgccccctttggcatcttctacgtcggcgtctttgcctgggcccatgttgctcctctgcttctctccaagtacgccatcgtctatctgtttgccattggggctgcctttgccatgcaagtcggccagatgattcttgcccatctcgtgcttgctccctttccccactggaacgtgctgctcttcttcccctttgtgggactggcagtgcactacattgcacccgtgtttggctgggacgccgatatcgtgtcggttaacactctcttcacctgttttggcgccaccctctccatttacgccttctttgtgcttgagatcatcgacgagatcaccaactacctcgatatctggtgtctgcgaatcaagtaccctcaggagaagaagaccgaataa

SEQ ID NO: 194 - protein, 394 aa, Yarrowia lipolytica
MGVFIKQEQLPALKKYKYSAEDHSFISNNILRPFWRQFVKIFPLWMAPNMVTLLGFFFVIVNFITMLIVDPTHDREPPRWVYLTYALGLFLYQTFDACDGSHARRTGQSGPLGELFDHCVDAMNTSLILTVVVSTTHMGYNMKLLIVQIAALGNFYLSTWETYHTGTLYLSGFSGPVEGILILVALFVLTFFTGPNVYALTVYEALPESITSLLPASFLDVTITQIYIGFGVLGMVFNIYGACGNVIKYYNNKGKSALPAILGIAPFGIFYVGVFAWAHVAPLLLSKYAIVYLFAIGAAFAMQVGQMILAHLVLAPFPHWNVLLFFPFVGLAVHYIAPVFGWDADIVSVNTLFTCFGATLSIYAFFVLEIIDEITNYLDIWCLRIKYPQEKKTE

SEQ ID NO: 195 - DNA, 14688 bp, Artificial Sequence
  Plasmid pZKLeuN-29E3
cgattgttgtctactaactatcgtacgataacttcgtatagcatacattatacgaagttatcgcgtcgacgagtatctgtctgactcgtcattgccgcctttggagtacgactccaactatgagtgtgcttggatcactttgacgatacattcttcgttggaggctgtgggtctgacagctgcgttttcggcgcggttggccgacaacaatatcagctgcaacgtcattgctggctttcatcatgatcacatttttgtcggcaaaggcgacgcccagagagccattgacgttctttctaatttggaccgatagccgtatagtccagtctatctataagttcaactaactcgtaactattaccataacatatacttcactgccccagataaggttccgataaaaagttctgcagactaaatttatttcagtctcctcttcaccaccaaaatgccctcctacgaagctcgagctaacgtccacaagtccgcctttgccgctcgagtgctcaagctcgtggcagccaagaaaaccaacctgtgtgcttctctggatgttaccaccaccaaggagctcattgagcttgccgataaggtcggaccttatgtgtgcatgatcaaaacccatatcgacatcattgacgacttcacctacgccggcactgtgctccccctcaaggaacttgctcttaagcacggtttcttcctgttcgaggacagaaagttcgcagatattggcaacactgtcaagcaccagtaccggtgtcaccgaatcgccgagtggtccgatatcaccaacgcccacggtgtacccggaaccggaatcattgctggcctgcgagctggtgccgaggaaactgtctctgaacagaagaaggaggacgtctctgactacgagaactcccagtacaaggagttcctagtcccctctcccaacgagaagctggccagaggtctgctcatgctggccgagctgtcttgcaagggctctctggccactggcgagtactccaagcagaccattgagcttgcccgatccgaccccgagtttgtggttggcttcattgcccagaaccgacctaagggcgactctgaggactggcttattctgacccccggggtgggtcttgacgacaagggagacgctctcggacagcagtaccgaactgttgaggatgtcatgtctaccggaacggatatcataattgtcggccgaggtctgtacggccagaaccgagatcctattgaggaggccaagcgataccagaaggctggctgggaggcttaccagaagattaactgttagaggttagactatggatatgtaatttaactgtgtatatagagagcgtgcaagtatggagcgcttgttcagcttgtatgatggtcagacgacctgtctgatcgagtatgtatgatactgcacaacctgtgtatccgcatgatctgtccaatggggcatgttgttgtgtttctcgatacggagatgctgggtacagtgctaatacgttgaactacttatacttatatgaggctcgaagaaagctgacttgtgtatgacttattctcaactacatccccagtcacaataccaccactgcactaccactacaccaaaaccatgatcaaaccacccatggacttcctggaggcagaagaacttgttatggaaaagctcaagagagagatcataacttcgtatagcatacattatacgaagttatcctgcaggtaaaggaattctggagtttctgagagaaaaaggcaagatacgtatgtaacaaagcgacgcatggtacaataataccggaggcatgtatcatagagagttagtggttcgatgatggcactggtgcctggtatgactttatacggctgactacatatttgtcctcagacatacaattacagtcaagcacttacccttggacatctgtaggtaccccccggccaagacgatctcagcgtgtcgtatgtcggattggcgtagctccctcgctcgtcaattggctcccatctactttcttctgcttggctacacccagcatgtctgctatggctcgttttcgtgccttatctatcctcccagtattaccaactctaaatgacatgatgtgattgggtctacactttcatatcagagataaggagtagcacagttgcataaaaagcccaactctaatcagcttcttcctttcttgtaattagtacaaaggtgattagcgaaatctggaagcttagttggccctaaaaaaatcaaaaaaagcaaaaaacgaaaaacgaaaaaccacagttttgagaacagggaggtaacgaaggatcgtatatatatatatatatatatatacccacggatcccgagaccggcctttgattcttccctacaaccaaccattctcaccaccctaattcacaaccatggagtctggacccatgcctgctggcattcccttccctgagtactatgacttctttatggactggaagactcccctggccatcgctgccacctacactgctgccgtcggtctcttcaaccccaaggttggcaaggtctcccgagtggttgccaagtcggctaacgcaaagcctgccgagcgaacccagtccggagctgccatgactgccttcgtctttgtgcacaacctcattctgtgtgtctactctggcatcaccttctactacatgtttcctgctatggtcaagaacttccgaacccacacactgcacgaagcctactgcgacacggatcagtccctctggaacaacgcacttggctactggggttacctcttctacctgtccaagttctacgaggtcattgacaccatcatcatcatcctgaagggacgacggtcctcgctgcttcagacctaccaccatgctggagccatgattaccatgtggtctggcatcaactaccaagccactcccatttggatctttgtggtcttcaactccttcattcacaccatcatgtactgttactatgccttcacctctatcggattccatcctcctggcaaaaagtacctgacttcgatgcagattactcagtttctggtcggtatcaccattgccgtgtcctacctcttcgttcctggctgcatccgaacacccggtgctcagatggctgtctggatcaacgtcggctacctgtttcccttgacctatctgttcgtggactttgccaagcgaacctactccaagcgatctgccattgccgctcagaaaaaggctcagtaagcggccgcattgatgattggaaacacacacatgggttatatctaggtgagagttagttggacagttatatattaaatcagctatgccaacggtaacttcattcatgtcaacgaggaaccagtgactgcaagtaatatagaatttgaccaccttgccattctcttgcactcctttactatatctcatttatttcttatatacaaatcacttcttcttcccagcatcgagctcggaaacctcatgagcaataacatcgtggatctcgtcaatagagggctttttggactccttgctgttggccaccttgtccttgctgtctggctcattctgtttcaacgccttttaattaacggagtaggtctcggtgtcggaagcgacgccagatccgtcatcctcctttcgctctccaaagtagatacctccgacgagctctcggacaatgatgaagtcggtgccctcaacgtttcggatgggggagagatcggcgagcttgggcgacagcagctggcagggtcgcaggttggcgtacaggttcaggtcctttcgcagcttgaggagaccctgctcgggtcgcacgtcggttcgtccgtcgggagtggtccatacggtgttggcagcgcctccgacagcaccgagcataatagagtcagcctttcggcagatgtcgagagtagcgtcggtgatgggctcgccctccttctcaatggcagctcctccaatgagtcggtcctcaaacacaaactcggtgccggaggcctcagcaacagacttgagcaccttgacggcctcggcaatcacctcggggccacagaagtcgccgccgagaagaacaatcttcttggagtcagtcttggtcttcttagtttcgggttccattgtggatgtgtgtggttgtatgtgtgatgtggtgtgtggagtgaaaatctgtggctggcaaacgctcttgtatatatacgcacttttgcccgtgctatgtggaagactaaacctccgaagattgtgactcaggtagtgcggtatcggctagggacccaaaccttgtcgatgccgatagcatgcgacgtcgggcccaattcgccctatagtgagtcgtattacaattcactggccgtcgttttacaacgtcgtgactgggaaaaccctggcgttacccaacttaatcgccttgcagcacatccccctttcgccagctggcgtaatagcgaagaggcccgcaccgatcgcccttcccaacagttgcgcagcctgaatggcgaatggacgcgccctgtagcggcgcattaagcgcggcgggtgtggtggttacgcgcagcgtgaccgctacacttgccagcgccctagcgcccgctcctttcgctttcttcccttcctttctcgccacgttcgccggctttccccgtcaagctctaaatcgggggctccctttagggttccgatttagtgctttacggcacctcgaccccaaaaaacttgattagggtgatggttcacgtagtgggccatcgccctgatagacggtttttcgccctttgacgttggagtccacgttctttaatagtggactcttgttccaaactggaacaacactcaaccctatctcggtctattcttttgatttataagggattttgccgatttcggcctattggttaaaaaatgagctgatttaacaaaaatttaacgcgaattttaacaaaatattaacgcttacaatttcctgatgcggtattttctccttacgcatctgtgcggtatttcacaccgcatcaggtggcacttttcggggaaatgtgcgcggaacccctatttgtttatttttctaaatacattcaaatatgtatccgctcatgagacaataaccctgataaatgcttcaataatattgaaaaaggaagagtatgagtattcaacatttccgtgtcgcccttattcccttttttgcggcattttgccttcctgtttttgctcacccagaaacgctggtgaaagtaaaagatgctgaagatcagttgggtgcacgagtgggttacatcgaactggatctcaacagcggtaagatccttgagagttttcgccccgaagaacgttttccaatgatgagcacttttaaagttctgctatgtggcgcggtattatcccgtattgacgccgggcaagagcaactcggtcgccgcatacactattctcagaatgacttggttgagtactcaccagtcacagaaaagcatcttacggatggcatgacagtaagagaattatgcagtgctgccataaccatgagtgataacactgcggccaacttacttctgacaacgatcggaggaccgaaggagctaaccgcttttttgcacaacatgggggatcatgtaactcgccttgatcgttgggaaccggagctgaatgaagccataccaaacgacgagcgtgacaccacgatgcctgtagcaatggcaacaacgttgcgcaaactattaactggcgaactacttactctagcttcccggcaacaattaatagactggatggaggcggataaagttgcaggaccacttctgcgctcggcccttccggctggctggtttattgctgataaatctggagccggtgagcgtgggtctcgcggtatcattgcagcactggggccagatggtaagccctcccgtatcgtagttatctacacgacggggagtcaggcaactatggatgaacgaaatagacagatcgctgagataggtgcctcactgattaagcattggtaactgtcagaccaagtttactcatatatactttagattgatttaaaacttcatttttaatttaaaaggatctaggtgaagatcctttttgataatctcatgaccaaaatcccttaacgtgagttttcgttccactgagcgtcagaccccgtagaaaagatcaaaggatcttcttgagatcctttttttctgcgcgtaatctgctgcttgcaaacaaaaaaaccaccgctaccagcggtggtttgtttgccggatcaagagctaccaactctttttccgaaggtaactggcttcagcagagcgcagataccaaatactgttcttctagtgtagccgtagttaggccaccacttcaagaactctgtagcaccgcctacatacctcgctctgctaatcctgttaccagtggctgctgccagtggcgataagtcgtgtcttaccgggttggactcaagacgatagttaccggataaggcgcagcggtcgggctgaacggggggttcgtgcacacagcccagcttggagcgaacgacctacaccgaactgagatacctacagcgtgagctatgagaaagcgccacgcttcccgaagggagaaaggcggacaggtatccggtaagcggcagggtcggaacaggagagcgcacgagggagcttccagggggaaacgcctggtatctttatagtcctgtcgggtttcgccacctctgacttgagcgtcgatttttgtgatgctcgtcaggggggcggagcctatggaaaaacgccagcaacgcggcctttttacggttcctggccttttgctggccttttgctcacatgttctttcctgcgttatcccctgattctgtggataaccgtattaccgcctttgagtgagctgataccgctcgccgcagccgaacgaccgagcgcagcgagtcagtgagcgaggaagcggaagagcgcccaatacgcaaaccgcctctccccgcgcgttggccgattcattaatgcagctggcgcgcccactgagctcgtctaacggacttgatatacaaccaattaaaacaaatgaaaagaaatacagttctttgtatcatttgtaacaattaccctgtacaaactaaggtattgaaatcccacaatattcccaaagtccacccctttccaaattgtcatgcctacaactcatataccaagcactaacctaccaaacaccactaaaaccccacaaaatatatcttaccgaatatacagtaacaagctaccaccacactcgttgggtgcagtcgccagcttaaagatatctatccacatcagccacaactcccttcctttaataaaccgactacacccttggctattgaggttatgagtgaatatactgtagacaagacactttcaagaagactgtttccaaaacgtaccactgtcctccactacaaacacacccaatctgcttcttctagtcaaggttgctacaccggtaaattataaatcatcatttcattagcagggcagggccctttttatagagtcttatacactagcggaccctgccggtagaccaacccgcaggcgcgtcagtttgctccttccatcaatgcgtcgtagaaacgacttactccttcttgagcagctccttgaccttgttggcaacaagtctccgacctcggaggtggaggaagagcctccgatatcggcggtagtgataccagcctcgacggactccttgacggcagcctcaacagcgtcaccggcgggcttcatgttaagagagaacttgagcatcatggcggcagacagaatggtggcgtacgcaactaacatgaatgaatacgatatacatcaaagactatgatacgcagtattgcacactgtacgagtaagagcactagccactgcactcaagtgaaaccgttgcccgggtacgagtatgagtatgtacagtatgtttagtattgtacttggacagtgcttgtatcgtacattctcaagtgtcaaacataaatatccgttgctatatcctcgcaccaccacgtagctcgctatatccctgtgttgaatccatccatcttggattgccaattgtgcacacagaaccgggcactcacttccccatccacacttgcggccgcttaagcaacgggcttgataacagcggggggggtgcccacgttgttgcggttgcggaagaacagaacacccttaccagcaccctcggcaccagcgctgggctcaacccactggcacatacgcgcactgcggtacatggcgcggatgaagccacgaggaccatcctggacatcagcccggtagtgcttgcccatgatgggcttaatggcctcggtggcctcgtccgcgttgtagaaggggatgctgctgacgtagtggtggaggacatgagtctcgatgatgccgtggagaaggtggcggccgatgaagcccatctcacggtcaatggtagcagcggcaccacggacgaagttccactcgtcgttggtgtagtggggaagggtagggtcggtgtgctggaggaaggtgatggcaacgagccagtggttaacccagaggtagggaacaaagtaccagatggccatgttgtagaaaccgaacttctgaacgaggaagtacagagcagtggccatcagaccgataccaatatcgctgaggacgatgagcttagcgtcactgttctcgtacagagggctgcggggatcgaagtggttaacaccaccgccgaggccgttatgcttgcccttgccgcgaccctcacgctggcgctcgtggtagttgtggccggtaacattggtgatgaggtagttgggccagccaacgagctgctgaaggacgagcatgagaagagtgaaagcgggggtctcctcagtaagatgagcgagctcgtgggtcatctttccgagacgagtagcctgctgctcgcgggttcggggaacgaagaccatgtcacgctccatgttgccagtggccttgtggtgctttcggtgggagatttgccagctgaagtaggggacaaggagggaagagtgaagaacccagccagtaatgtcgttgatgatgcgagaatcggagaaagcaccgtgaccgcactcatgggcaataacccagagaccagtaccgaaaagaccctgaagaacggtgtacacggcccacagaccagcgcgggcgggggtggaggggatatattcgggggtcacaaagttgtaccagatgctgaaagtggtagtcaggaggacaatgtcgcggaggatataaccgtatcccttgagagcggagcgcttgaagcagtgcttagggatggcattgtagatgtccttgatggtaaagtcgggaacctcgaactggttgccgtaggtgtcgagcatgacaccatactcggacttgggcttggcgatatcaacctcggacatggacgagagcgatgtggaagaggccgagtggcggggagagtctgaaggagagacggcggcagactcagaatccgtcacagtagttgaggtgacggtgcgtctaagcgcagggttctgcttgggcagagccgaagtggacgccatggttgatgtgtgtttaattcaagaatgaatatagagaagagaagaagaaaaaagattcaattgagccggcgatgcagacccttatataaatgttgccttggacagacggagcaagcccgcccaaacctacgttcggtataatatgttaagctttttaacacaaaggtttggcttggggtaacctgatgtggtgcaaaagaccgggcgttggcgagccattgcgcgggcgaatggggccgtgactcgtctcaaattcgagggcgtgcctcaattcgtgcccccgtggctttttcccgccgtttccgccccgtttgcaccactgcagccgcttctttggttcggacaccttgctgcgagctaggtgccttgtgctacttaaaaagtggcctcccaacaccaacatgacatgagtgcgtgggccaagacacgttggcggggtcgcagtcggctcaatggcccggaaaaaacgctgctggagctggttcggacgcagtccgccgcggcgtatggatatccgcaaggttccatagcgccattgccctccgtcggcgtctatcccgcaacctctaaatagagcgggaatataacccaagcttcttttttttcctttaacacgcacacccccaactatcatgttgctgctgctgtttgactctactctgtggaggggtgctcccacccaacccaacctacaggtggatccggcgctgtgattggctgataagtctcctatccggactaattctgaccaatgggacatgcgcgcaggacccaaatgccgcaattacgtaaccccaacgaaatgcctacccctctttggagcccagcggccccaaatccccccaagcagcccggttctaccggcttccatctccaagcacaagcagcccggttctaccggcttccatctccaagcacccctttctccacaccccacaaaaagacccgtgcaggacatcctactgcgtcgacatcatttaaattccttcacttcaagttcattcttcatctgcttctgttttactttgacaggcaaatgaagacatggtacgacttgatggaggccaagaacgccatttcaccccgagacaccgaagtgcctgaaatcctggctgcccccattgataacatcggaaactacggtattccggaaagtgtatatagaacctttccccagcttgtgtctgtggatatggatggtgtaatcccctttgagtactcgtcttggcttctctccgagcagtatgaggctctctaatctagcgcatttaatatctcaatgtatttatatatttatcttctcatgcggccgctcactgaatctttttggctcccttgtgcttcctgacgatatacgtttgcacatagaaattcaagaacaaacacaagactgtgccaacataaaagtaattgaagaaccagccaaacatcctcatcccatcttggcgataacagggaatgttcctgtacttccagacaatgtagaaaccaacattgaattgaatgatctgcattgatgtaatcagggattttggcatggggaacttcagcttgatcaatctggtccaataataaccgtacatgatccagtggatgaaaccattcaacagcacaaaaatccaaacagcttcatttcggtaattatagaacagccacatatccatcggtgcccccaaatgatggaagaattgcaaccaggtcagaggcttgcccatcagtggcaaatagaaggagtcaatatactccaggaacttgctcaaatagaacaactgcgtggtgatcctgaagacgttgttgtcaaaagccttctcgcagttgtcagacataacaccgatggtgtacatggcatatgccattgagaggaatgatcccaacgaataaatggacatgagaaggttgtaattggtgaaaacaaacttcatacgagactgaccttttggaccaagggggccaagagtgaacttcaagatgacaaatgcgatggacaagtaaagcacctcacagtgactggcatcactccagagttgggcataatcaactggttgggtaaaacttcctgcccaattgagactatttcattcaccacctccatggccattgctgtagatatgtcttgtgtgtaagggggttggggtggttgtttgtgttcttgacttttgtgttagcaagggaagacgggcaaaaaagtgagtgtggttgggagggagagacgagccttatatataatgcttgtttgtgtttgtgcaagtggacgccgaaacgggcaggagccaaactaaacaaggcagacaatgcgagcttaattggattgcctgatgggcaggggttagggctcgatcaatgggggtgcgaagtgacaaaattgggaattaggttcgcaagcaaggctgacaagactttggcccaaacatttgtacgcggtggacaacaggagccacccatcgtctgtcacgggctagccggtcgtgcgtcctgtcaggctccacctaggctccatgccactccatacaatcccactagtgtaccgctaggccgcttttagctcccatctaagacccccccaaaacctccactgtacagtgcactgtactgtgtggcgatcaagggcaagggaaaaaaggcgcaaacatgcacgcatggaatgacgtaggtaaggcgttactagactgaaaagtggcacatttcggcgtgccaaagggtcctaggtgcgtttcgcgagctgggcgccaggccaagccgctccaaaacgcctctccgactccctccagcggcctccatatccccatccctctccacagcaatgttgttaagccttgcaaacgaaaaaatagaaaggctaataagcttccaatattgtggtgtacgctgcataacgcaacaatgagcgccaaacaacacacacacacagcacacagcagcattaaccacgatgaacagcatgacattacaggtgggtgtgtaatcagggccctgattgctggtggtgggagcccccatcatgggcagatctgcgtacactgtttaaacagtgtacgcagatctactatagaggaacatttaaattgccccggagaagacggccaggccgcctagatgacaaattcaacaactcacagctgactttctgccattgccactaggggggggcctttttatatggccaagccaagctctccacgtcggttgggctgcacccaacaataaatgggtagggttgcaccaacaaagggatgggatggggggtagaagatacgaggataacggggctcaatggcacaaataagaacgaatactgccattaagactcgtgatccagcgactgacaccattgcatcatctaagggcctcaaaactacctcggaactgctgcgctgatctggacaccacagaggttccgagcactttaggttgcaccaaatgtcccaccaggtgcaggcagaaaacgctggaacagcgtgtacagtttgtcttaacaaaaagtgagggcgctgaggtcgagcagggtggtgtgacttgttatagcctttagagctgcgaaagcgcgtatggatttggctcatcaggccagattgagggtctgtggacacatgtcatgttagtgtacttcaatcgccccctggatatagccccgacaataggccgtggcctcatttttttgccttccgcacatttccattgctcgatacccacaccttgcttctcctgcacttgccaaccttaatactggtttacattgaccaacatcttacaagcggggggcttgtctagggtatatataaacagtggctctcccaatcggttgccagtctcttttttcctttctttccccacagattcgaaatctaaactacacatcacagaattccgagccgtgagtatccacgacaagatcagtgtcgagacgacgcgttttgtgtaatgacacaatccgaaagtcgctagcaacacacactctctacacaaactaacccagctctggtaccatggaggtcgtgaacgaaatcgtctccattggccaggaggttcttcccaaggtcgactatgctcagctctggtctgatgcctcgcactgcgaggtgctgtacctctccatcgccttcgtcatcctgaagttcacccttggtcctctcggacccaagggtcagtctcgaatgaagtttgtgttcaccaactacaacctgctcatgtccatctactcgctgggctccttcctctctatggcctacgccatgtacaccattggtgtcatgtccgacaactgcgagaaggctttcgacaacaatgtcttccgaatcaccactcagctgttctacctcagcaagttcctcgagtacattgactccttctatctgcccctcatgggcaagcctctgacctggttgcagttctttcaccatctcggagctcctatggacatgtggctgttctacaactaccgaaacgaagccgtttggatctttgtgctgctcaacggcttcattcactggatcatgtacggctactattggacccgactgatcaagctcaagttccctatgcccaagtccctgattacttctatgcagatcattcagttcaacgttggcttctacatcgtctggaagtaccggaacattccctgctaccgacaagatggaatgagaatgtttggctggtttttcaactacttctacgttggtactgtcctgtgtctgttcctcaacttctacgtgcagacctacatcgtccgaaagcacaagggagccaaaaagattcagtgagcggccgcatgtacatacaagattatttatagaaatgaatcgcgatcgaacaaagagtacgagtgtacgagtaggggatgatgataaaagtggaagaagttccgcatctttggatttatcaacgtgtaggacgatacttcctgtaaaaatgcaatgtctttaccataggttctgctgtagatgttattaactaccattaacatgtctacttgtacagttgcagaccagttggagtatagaatggtacacttaccaaaaagtgttgatggttgtaactacgatatataaaactgttgacgggatccccgctgatatgcctaaggaacaatcaaagaggaagatattaattcagaatgctagtatacagttagggat

SEQ ID NO: 196 - DNA, 1434 bp, Fusarium monoliforme
  CDS (1)..(1434): delta-12 desaturase
  ref <302>: TITLE: DELTA-12 DESATURASES SUITABLE FOR ALTERING LEVELS OF POLYUNSATURATED FATTY ACIDS IN OLEAGINOUS YEAST
  ref <310>: PATENT DOCUMENT NUMBER: WO 2005/047485
  ref <311>: PATENT FILING DATE: 2004-11-12
  ref <312>: PUBLICATION DATE: 2005-05-26
  ref <313>: RELEVANT RESIDUES IN SEQ ID NO: (1)..(1434)
  ref <302>: TITLE: DELTA-12 DESATURASES SUITABLE FOR ALTERING LEVELS OF POLYUNSATURATED FATTY ACIDS IN OLEAGINOUS YEAST
  ref <310>: PATENT DOCUMENT NUMBER: US 2005-0216975-A1
  ref <311>: PATENT FILING DATE: 2004-11-10
  ref <312>: PUBLICATION DATE: 2005-09-29
  ref <313>: RELEVANT RESIDUES IN SEQ ID NO: (1)..(1434)
atggcgtccacttcggctctgcccaagcagaaccctgcgcttagacgcaccgtcacctcaactactgtgacggattctgagtctgccgccgtctctccttcagactctccccgccactcggcctcttccacatcgctctcgtccatgtccgaggttgatatcgccaagcccaagtccgagtatggtgtcatgctcgacacctacggcaaccagttcgaggttcccgactttaccatcaaggacatctacaatgccatccctaagcactgcttcaagcgctccgctctcaagggatacggttatatcctccgcgacattgtcctcctgactaccactttcagcatctggtacaactttgtgacccccgaatatatcccctccacccccgcccgcgctggtctgtgggccgtgtacaccgttcttcagggtcttttcggtactggtctctgggttattgcccatgagtgcggtcacggtgctttctccgattctcgcatcatcaacgacattactggctgggttcttcactcttccctccttgtcccctacttcagctggcaaatctcccaccgaaagcaccacaaggccactggcaacatggagcgtgacatggtcttcgttccccgaacccgcgagcagcaggctactcgtctcggaaagatgacccacgagctcgctcatcttactgaggagacccccgctttcactcttctcatgctcgtccttcagcagctcgttggctggcccaactacctcatcaccaatgttaccggccacaactaccacgagcgccagcgtgagggtcgcggcaagggcaagcataacggcctcggcggtggtgttaaccacttcgatccccgcagccctctgtacgagaacagtgacgctaagctcatcgtcctcagcgatattggtatcggtctgatggccactgctctgtacttcctcgttcagaagttcggtttctacaacatggccatctggtactttgttccctacctctgggttaaccactggctcgttgccatcaccttcctccagcacaccgaccctacccttccccactacaccaacgacgagtggaacttcgtccgtggtgccgctgctaccattgaccgtgagatgggcttcatcggccgccaccttctccacggcatcatcgagactcatgtcctccaccactacgtcagcagcatccccttctacaacgcggacgaggccaccgaggccattaagcccatcatgggcaagcactaccgggctgatgtccaggatggtcctcgtggcttcatccgcgccatgtaccgcagtgcgcgtatgtgccagtgggttgagcccagcgctggtgccgagggtgctggtaagggtgttctgttcttccgcaaccgcaacaacgtgggcaccccccccgctgttatcaagcccgttgcttaa

SEQ ID NO: 197 - protein, 477 aa, Fusarium monoliforme
MASTSALPKQNPALRRTVTSTTVTDSESAAVSPSDSPRHSASSTSLSSMSEVDIAKPKSEYGVMLDTYGNQFEVPDFTIKDIYNAIPKHCFKRSALKGYGYILRDIVLLTTTFSIWYNFVTPEYIPSTPARAGLWAVYTVLQGLFGTGLWVIAHECGHGAFSDSRIINDITGWVLHSSLLVPYFSWQISHRKHHKATGNMERDMVFVPRTREQQATRLGKMTHELAHLTEETPAFTLLMLVLQQLVGWPNYLITNVTGHNYHERQREGRGKGKHNGLGGGVNHFDPRSPLYENSDAKLIVLSDIGIGLMATALYFLVQKFGFYNMAIWYFVPYLWVNHWLVAITFLQHTDPTLPHYTNDEWNFVRGAAATIDREMGFIGRHLLHGIIETHVLHHYVSSIPFYNADEATEAIKPIMGKHYRADVQDGPRGFIRAMYRSARMCQWVEPSAGAEGAGKGVLFFRNRNNVGTPPAVIKPVA

SEQ ID NO: 198 - DNA, 777 bp, Euglena gracilis
  CDS (1)..(777): synthetic delta-9 elongase (codon-optimized for Yarrowia lipolytica)
  ref <302>: TITLE: DELTA-9 ELONGASES AND THEIR USE IN MAKING POLYUNSATURATED FATTY ACIDS
  ref <310>: PATENT DOCUMENT NUMBER: WO 2007/061742
  ref <311>: PATENT FILING DATE: 2006-11-16
  ref <312>: PUBLICATION DATE: 2007-05-31
  ref <313>: RELEVANT RESIDUES IN SEQ ID NO: (1)..(777)
  ref <302>: TITLE: DELTA-9 ELONGASES AND THEIR USE IN MAKING POLYUNSATURATED FATTY ACIDS
  ref <310>: PATENT DOCUMENT NUMBER: US-2007-0117190-A1
  ref <311>: PATENT FILING DATE: 2006-11-16
  ref <312>: PUBLICATION DATE: 2007-05-24
  ref <313>: RELEVANT RESIDUES IN SEQ ID NO: (1)..(777)
atggaggtcgtgaacgaaatcgtctccattggccaggaggttcttcccaaggtcgactatgctcagctctggtctgatgcctcgcactgcgaggtgctgtacctctccatcgccttcgtcatcctgaagttcacccttggtcctctcggacccaagggtcagtctcgaatgaagtttgtgttcaccaactacaacctgctcatgtccatctactcgctgggctccttcctctctatggcctacgccatgtacaccattggtgtcatgtccgacaactgcgagaaggctttcgacaacaatgtcttccgaatcaccactcagctgttctacctcagcaagttcctcgagtacattgactccttctatctgcccctcatgggcaagcctctgacctggttgcagttctttcaccatctcggagctcctatggacatgtggctgttctacaactaccgaaacgaagccgtttggatctttgtgctgctcaacggcttcattcactggatcatgtacggctactattggacccgactgatcaagctcaagttccctatgcccaagtccctgattacttctatgcagatcattcagttcaacgttggcttctacatcgtctggaagtaccggaacattccctgctaccgacaagatggaatgagaatgtttggctggtttttcaactacttctacgttggtactgtcctgtgtctgttcctcaacttctacgtgcagacctacatcgtccgaaagcacaagggagccaaaaagattcagtga

SEQ ID NO: 199 - protein, 258 aa, Euglena gracilis
MEVVNEIVSIGQEVLPKVDYAQLWSDASHCEVLYLSIAFVILKFTLGPLGPKGQSRMKFVFTNYNLLMSIYSLGSFLSMAYAMYTIGVMSDNCEKAFDNNVFRITTQLFYLSKFLEYIDSFYLPLMGKPLTWLQFFHHLGAPMDMWLFYNYRNEAVWIFVLLNGFIHWIMYGYYWTRLIKLKFPMPKSLITSMQIIQFNVGFYIVWKYRNIPCYRQDGMRMFGWFFNYFYVGTVLCLFLNFYVQTYIVRKHKGAKKIQ

SEQ ID NO: 200 - DNA, 34 bp, Escherichia coli
ataacttcgtataatgtatgctatacgaagttat

SEQ ID NO: 201 - DNA, 828 bp, Mortierella alpina
  CDS (1)..(828): synthetic C16/18 elongase (codon-optimized for Yarrowia lipolytica)
  ref <302>: TITLE: A MORTIERELLA ALPINA C16/18 FATTY ACID ELONGASE
  ref <310>: PATENT DOCUMENT NUMBER: US 2007-0087420-A1
  ref <311>: PATENT FILING DATE: 2005-10-19
  ref <312>: PUBLICATION DATE: 2007-04-19
  ref <313>: RELEVANT RESIDUES IN SEQ ID NO: (1)..(828)
  ref <302>: TITLE: A MORTIERELLA ALPINA C16/18 FATTY ACID ELONGASE
  ref <310>: PATENT DOCUMENT NUMBER: WO 2007/046817
  ref <311>: PATENT FILING DATE: 2005-11-04
  ref <312>: PUBLICATION DATE: 2007-04-26
  ref <313>: RELEVANT RESIDUES IN SEQ ID NO: (1)..(828)
atggagtctggacccatgcctgctggcattcccttccctgagtactatgacttctttatggactggaagactcccctggccatcgctgccacctacactgctgccgtcggtctcttcaaccccaaggttggcaaggtctcccgagtggttgccaagtcggctaacgcaaagcctgccgagcgaacccagtccggagctgccatgactgccttcgtctttgtgcacaacctcattctgtgtgtctactctggcatcaccttctactacatgtttcctgctatggtcaagaacttccgaacccacacactgcacgaagcctactgcgacacggatcagtccctctggaacaacgcacttggctactggggttacctcttctacctgtccaagttctacgaggtcattgacaccatcatcatcatcctgaagggacgacggtcctcgctgcttcagacctaccaccatgctggagccatgattaccatgtggtctggcatcaactaccaagccactcccatttggatctttgtggtcttcaactccttcattcacaccatcatgtactgttactatgccttcacctctatcggattccatcctcctggcaaaaagtacctgacttcgatgcagattactcagtttctggtcggtatcaccattgccgtgtcctacctcttcgttcctggctgcatccgaacacccggtgctcagatggctgtctggatcaacgtcggctacctgtttcccttgacctatctgttcgtggactttgccaagcgaacctactccaagcgatctgccattgccgctcagaaaaaggctcagtaa

SEQ ID NO: 202 - protein, 275 aa, Mortierella alpina
MESGPMPAGIPFPEYYDFFMDWKTPLAIAATYTAAVGLFNPKVGKVSRVVAKSANAKPAERTQSGAAMTAFVFVHNLILCVYSGITFYYMFPAMVKNFRTHTLHEAYCDTDQSLWNNALGYWGYLFYLSKFYEVIDTIIIILKGRRSSLLQTYHHAGAMITMWSGINYQATPIWIFVVFNSFIHTIMYCYYAFTSIGFHPPGKKYLTSMQITQFLVGITIAVSYLFVPGCIRTPGAQMAVWINVGYLFPLTYLFVDFAKRTYSKRSAIAAQKKAQ

SEQ ID NO: 203 - DNA, 8739 bp, Artificial Sequence
  Plasmid pY116
ggccgccaccgcggcccgagattccggcctcttcggccgccaagcgacccgggtggacgtctagaggtacctagcaattaacagatagtttgccggtgataattctcttaacctcccacactcctttgacataacgatttatgtaacgaaactgaaatttgaccagatattgtgtccgcggtggagctccagcttttgttccctttagtgagggtttaaacgagcttggcgtaatcatggtcatagctgtttcctgtgtgaaattgttatccgctcacaattccacacaacgtacgagccggaagcataaagtgtaaagcctggggtgcctaatgagtgagctaactcacattaattgcgttgcgctcactgcccgctttccagtcgggaaacctgtcgtgccagctgcattaatgaatcggccaacgcgcggggagaggcggtttgcgtattgggcgctcttccgcttcctcgctcactgactcgctgcgctcggtcgttcggctgcggcgagcggtatcagctcactcaaaggcggtaatacggttatccacagaatcaggggataacgcaggaaagaacatgtgagcaaaaggccagcaaaaggccaggaaccgtaaaaaggccgcgttgctggcgtttttccataggctccgcccccctgacgagcatcacaaaaatcgacgctcaagtcagaggtggcgaaacccgacaggactataaagataccaggcgtttccccctggaagctccctcgtgcgctctcctgttccgaccctgccgcttaccggatacctgtccgcctttctcccttcgggaagcgtggcgctttctcatagctcacgctgtaggtatctcagttcggtgtaggtcgttcgctccaagctgggctgtgtgcacgaaccccccgttcagcccgaccgctgcgccttatccggtaactatcgtcttgagtccaacccggtaagacacgacttatcgccactggcagcagccactggtaacaggattagcagagcgaggtatgtaggcggtgctacagagttcttgaagtggtggcctaactacggctacactagaaggacagtatttggtatctgcgctctgctgaagccagttaccttcggaaaaagagttggtagctcttgatccggcaaacaaaccaccgctggtagcggtggtttttttgtttgcaagcagcagattacgcgcagaaaaaaaggatctcaagaagatcctttgatcttttctacggggtctgacgctcagtggaacgaaaactcacgttaagggattttggtcatgagattatcaaaaaggatcttcacctagatccttttaaattaaaaatgaagttttaaatcaatctaaagtatatatgagtaaacttggtctgacagttaccaatgcttaatcagtgaggcacctatctcagcgatctgtctatttcgttcatccatagttgcctgactccccgtcgtgtagataactacgatacgggagggcttaccatctggccccagtgctgcaatgataccgcgagacccacgctcaccggctccagatttatcagcaataaaccagccagccggaagggccgagcgcagaagtggtcctgcaactttatccgcctccatccagtctattaattgttgccgggaagctagagtaagtagttcgccagttaatagtttgcgcaacgttgttgccattgctacaggcatcgtggtgtcacgctcgtcgtttggtatggcttcattcagctccggttcccaacgatcaaggcgagttacatgatcccccatgttgtgcaaaaaagcggttagctccttcggtcctccgatcgttgtcagaagtaagttggccgcagtgttatcactcatggttatggcagcactgcataattctcttactgtcatgccatccgtaagatgcttttctgtgactggtgagtactcaaccaagtcattctgagaatagtgtatgcggcgaccgagttgctcttgcccggcgtcaatacgggataataccgcgccacatagcagaactttaaaagtgctcatcattggaaaacgttcttcggggcgaaaactctcaaggatcttaccgctgttgagatccagttcgatgtaacccactcgtgcacccaactgatcttcagcatcttttactttcaccagcgtttctgggtgagcaaaaacaggaaggcaaaatgccgcaaaaaagggaataagggcgacacggaaatgttgaatactcatactcttcctttttcaatattattgaagcatttatcagggttattgtctcatgagcggatacatatttgaatgtatttagaaaaataaacaaataggggttccgcgcacatttccccgaaaagtgccacctgacgcgccctgtagcggcgcattaagcgcggcgggtgtggtggttacgcgcagcgtgaccgctacacttgccagcgccctagcgcccgctcctttcgctttcttcccttcctttctcgccacgttcgccggctttccccgtcaagctctaaatcgggggctccctttagggttccgatttagtgctttacggcacctcgaccccaaaaaacttgattagggtgatggttcacgtagtgggccatcgccctgatagacggtttttcgccctttgacgttggagtccacgttctttaatagtggactcttgttccaaactggaacaacactcaaccctatctcggtctattcttttgatttataagggattttgccgatttcggcctattggttaaaaaatgagctgatttaacaaaaatttaacgcgaattttaacaaaatattaacgcttacaatttccattcgccattcaggctgcgcaactgttgggaagggcgatcggtgcgggcctcttcgctattacgccagctggcgaaagggggatgtgctgcaaggcgattaagttgggtaacgccagggttttcccagtcacgacgttgtaaaacgacggccagtgaattgtaatacgactcactatagggcgaattgggtaccgggccccccctcgaggtcgatggtgtcgataagcttgatatcgaattcatgtcacacaaaccgatcttcgcctcaaggaaacctaattctacatccgagagactgccgagatccagtctacactgattaattttcgggccaataatttaaaaaaatcgtgttatataatattatatgtattatatatatacatcatgatgatactgacagtcatgtcccattgctaaatagacagactccatctgccgcctccaactgatgttctcaatatttaaggggtcatctcgcattgtttaataataaacagactccatctaccgcctccaaatgatgttctcaaaatatattgtatgaacttatttttattacttagtattattagacaacttacttgctttatgaaaaacacttcctatttaggaaacaatttataatggcagttcgttcatttaacaatttatgtagaataaatgttataaatgcgtatgggaaatcttaaatatggatagcataaatgatatctgcattgcctaattcgaaatcaacagcaacgaaaaaaatcccttgtacaacataaatagtcatcgagaaatatcaactatcaaagaacagctattcacacgttactattgagattattattggacgagaatcacacactcaactgtctttctctcttctagaaatacaggtacaagtatgtactattctcattgttcatacttctagtcatttcatcccacatattccttggatttctctccaatgaatgacattctatcttgcaaattcaacaattataataagatataccaaagtagcggtatagtggcaatcaaaaagcttctctggtgtgcttctcgtatttatttttattctaatgatccattaaaggtatatatttatttcttgttatataatccttttgtttattacatgggctggatacataaaggtattttgatttaattttttgcttaaattcaatcccccctcgttcagtgtcaactgtaatggtaggaaattaccatacttttgaagaagcaaaaaaaatgaaagaaaaaaaaaatcgtatttccaggttagacgttccgcagaatctagaatgcggtatgcggtacattgttcttcgaacgtaaaagttgcgctccctgagatattgtacatttttgcttttacaagtacaagtacatcgtacaactatgtactactgttgatgcatccacaacagtttgttttgtttttttttgttttttttttttctaatgattcattaccgctatgtatacctacttgtacttgtagtaagccgggttattggcgttcaattaatcatagacttatgaatctgcacggtgtgcgctgcgagttacttttagcttatgcatgctacttgggtgtaatattgggatctgttcggaaatcaacggatgctcaaccgatttcgacagtaattaattaatttgaatcgaatcggagcctaaaatgaacccgagtatatctcataaaattctcggtgagaggtctgtgactgtcagtacaaggtgccttcattatgccctcaaccttaccatacctcactgaatgtagtgtacctctaaaaatgaaatacagtgccaaaagccaaggcactgagctcgtctaacggacttgatatacaaccaattaaaacaaatgaaaagaaatacagttctttgtatcatttgtaacaattaccctgtacaaactaaggtattgaaatcccacaatattcccaaagtccacccctttccaaattgtcatgcctacaactcatataccaagcactaacctaccaaacaccactaaaaccccacaaaatatatcttaccgaatatacagtaacaagctaccaccacactcgttgggtgcagtcgccagcttaaagatatctatccacatcagccacaactcccttcctttaataaaccgactacacccttggctattgaggttatgagtgaatatactgtagacaagacactttcaagaagactgtttccaaaacgtaccactgtcctccactacaaacacacccaatctgcttcttctagtcaaggttgctacaccggtaaattataaatcatcatttcattagcagggcagggccctttttatagagtcttatacactagcggaccctgccggtagaccaacccgcaggcgcgtcagtttgctccttccatcaatgcgtcgtagaaacgacttactccttcttgagcagctccttgaccttgttggcaacaagtctccgacctcggaggtggaggaagagcctccgatatcggcggtagtgataccagcctcgacggactccttgacggcagcctcaacagcgtcaccggcgggcttcatgttaagagagaacttgagcatcatggcggcagacagaatggtggcaatggggttgaccttctgcttgccgagatcgggggcagatccgtgacagggctcgtacagaccgaacgcctcgttggtgtcgggcagagaagccagagaggcggagggcagcagacccagagaaccggggatgacggaggcctcgtcggagatgatatcgccaaacatgttggtggtgatgatgataccattcatcttggagggctgcttgatgaggatcatggcggccgagtcgatcagctggtggttgagctcgagctgggggaattcgtccttgaggactcgagtgacagtctttcgccaaagtcgagaggaggccagcacgttggccttgtcaagagaccacacgggaagaggggggttgtgctgaagggccaggaaggcggccattcgggcaattcgctcaacctcaggaacggagtaggtctcggtgtcggaagcgacgccagatccgtcatcctcctttcgctctccaaagtagatacctccgacgagctctcggacaatgatgaagtcggtgccctcaacgtttcggatgggggagagatcggcgagcttgggcgacagcagctggcagggtcgcaggttggcgtacaggttcaggtcctttcgcagcttgaggagaccctgctcgggtcgcacgtcggttcgtccgtcgggagtggtccatacggtgttggcagcgcctccgacagcaccgagcataatagagtcagcctttcggcagatgtcgagagtagcgtcggtgatgggctcgccctccttctcaatggcagctcctccaatgagtcggtcctcaaacacaaactcggtgccggaggcctcagcaacagacttgagcaccttgacggcctcggcaatcacctcggggccacagaagtcgccgccgagaagaacaatcttcttggagtcagtcttggtcttcttagtttcgggttccattgtggatgtgtgtggttgtatgtgtgatgtggtgtgtggagtgaaaatctgtggctggcaaacgctcttgtatatatacgcacttttgcccgtgctatgtggaagactaaacctccgaagattgtgactcaggtagtgcggtatcggctagggacccaaaccttgtcgatgccgatagcgctatcgaacgtaccccagccggccgggagtatgtcggaggggacatacgagatcgtcaagggtttgtggccaactggtatttaaatgtagctaacggtagcaggcgaactactggtacatacctcccccggaatatgtacaggcataatgcgtatctgtgggacatgtggtcgttgcgccattatgtaagcagcgtgtactcctctgactgtccatatggtttgctccatctcaccctcatcgttttcattgttcacaggcggccacaaaaaaactgtcttctctccttctctcttcgccttagtctactcggaccagttttagtttagcttggcgccactggataaatgagacctcaggccttgtgatgaggaggtcacttatgaagcatgttaggaggtgcttgtatggatagagaagcacccaaaataataagaataataataaaacagggggcgttgtcatttcatatcgtgttttcaccatcaatacacctccaaacaatgcccttcatgtggccagccccaatattgtcctgtagttcaactctatgcagctcgtatcttattgagcaagtaaaactctgtcagccgatattgcccgacccgcgacaagggtcaacaaggtggtgtaaggccttcgcagaagtcaaaactgtgccaaacaaacatctagagtctctttggtgtttctcgcatatatttwatcggctgtcttacgtatttgcgcctcggtaccggactaatttcggatcatccccaatacgctttttcttcgcagctgtcaacagtgtccatgatctatccacctaaatgggtcatatgaggcgtataatttcgtggtgctgataataattcccatatatttgacacaaaacttccccccctagacatacatctcacaatctcacttcttgtgcttctgtcacacatctcctccagctgacttcaactcacacctctgccccagttggtctacagcggtataaggtttctccgcatagaggtgcaccactcctcccgatacttgtttgtgtgacttgtgggtcacgacatatatatctacacacattgcgccaccctttggttcttccagcacaacaaaaacacgacacgctaaccatggccaatttactgaccgtacaccaaaatttgcctgcattaccggtcgatgcaacgagtgatgaggttcgcaagaacctgatggacatgttcagggatcgccaggcgttttctgagcatacctggaaaatgcttctgtccgtttgccggtcgtgggcggcatggtgcaagttgaataaccggaaatggtttcccgcagaacctgaagatgttcgcgattatcttctatatcttcaggcgcgcggtctggcagtaaaaactatccagcaacatttgggccagctaaacatgcttcatcgtcggtccgggctgccacgaccaagtgacagcaatgctgtttcactggttatgcggcggatccgaaaagaaaacgttgatgccggtgaacgtgcaaaacaggctctagcgttcgaacgcactgatttcgaccaggttcgttcactcatggaaaatagcgatcgctgccaggatatacgtaatctggcatttctggggattgcttataacaccctgttacgtatagccgaaattgccaggatcagggttaaagatatctcacgtactgacggtgggagaatgttaatccatattggcagaacgaaaacgctggttagcaccgcaggtgtagagaaggcacttagcctgggggtaactaaactggtcgagcgatggatttccgtctctggtgtagctgatgatccgaataactacctgttttgccgggtcagaaaaaatggtgttgccgcgccatctgccaccagccagctatcaactcgcgccctggaagggatttttgaagcaactcatcgattgatttacggcgctaaggatgactctggtcagagatacctggcctggtctggacacagtgcccgtgtcggagccgcgcgagatatggcccgcgctggagtttcaataccggagatcatgcaagctggtggctggaccaatgtaaatattgtcatgaactatatccgtaacctggatagtgaaacaggggcaatggtgcgcctgctggaagatggcgattaagc

SEQ ID NO: 204 - DNA, 15337 bp, Artificial Sequence
  Plasmid pKO2UF8289
cgatcgaggaagaggacaagcggctgcttcttaagtttgtgacatcagtatccaaggcaccattgcaaggattcaaggctttgaacccgtcatttgccattcgtaacgctggtagacaggttgatcggttccctacggcctccacctgtgtcaatcttctcaagctgcctgactatcaggacattgatcaacttcggaagaaacttttgtatgccattcgatcacatgctggtttcgatttgtcttagaggaacgcatatacagtaatcatagagaataaacgatattcatttattaaagtagatagttgaggtagaagttgtaaagagtgataaatagcggccgctcactgaatctttttggctcccttgtgcttcctgacgatatacgtttgcacatagaaattcaagaacaaacacaagactgtgccaacataaaagtaattgaagaaccagccaaacatcctcatcccatcttggcgataacagggaatgttcctgtacttccagacaatgtagaaaccaacattgaattgaatgatctgcattgatgtaatcagggattttggcatggggaacttcagcttgatcaatctggtccaataataaccgtacatgatccagtggatgaaaccattcaacagcacaaaaatccaaacagcttcatttcggtaattatagaacagccacatatccatcggtgcccccaaatgatggaagaattgcaaccaggtcagaggcttgcccatcagtggcaaatagaaggagtcaatatactccaggaacttgctcaaatagaacaactgcgtggtgatcctgaagacgttgttgtcaaaagccttctcgcagttgtcagacataacaccgatggtgtacatggcatatgccattgagaggaatgatcccaacgaataaatggacatgagaaggttgtaattggtgaaaacaaacttcatacgagactgaccttttggaccaagggggccaagagtgaacttcaagatgacaaatgcgatggacaagtaaagcacctcacagtgactggcatcactccagagttgggcataatcaactggttgggtaaaacttcctgcccaattgagactatttcattcaccacctccatggttagcgtgtcgtgtttttgttgtgctggaagaaccaaagggtggcgcaatgtgtgtagatatatatgtcgtgacccacaagtcacacaaacaagtatcgggaggagtggtgcacctctatgcggagaaaccttataccgctgtagaccaactggggcagaggtgtgagttgaagtcagctggaggagatgtgtgacagaagcacaagaagtgagattgtgagatgtatgtctagggggggaagttttgtgtcaaatatatgggaattattatcagcaccacgaaattatacgcctcatatgacccatttaggtggatagatcatggacactgttgacagctgcgaagaaaaagcgtattggggatgatccgaaattagtccggtaccgaggcgcaaatacgtaagacagccgatwaaatatatgcgagaaacaccaaagagactctagatgtttgtttggcacagttttgacttctgcgaaggccttacaccaccttgttgacccttgtcgcgggtcgggcaatatcggctgacagagttttacttgctcaataagatacgagctgcatagagttgaactacaggacaatattggggctggccacatgaagggcattgtttggaggtgtattgatggtgaaaacacgatatgaaatgacaacgccccctgttttattattattcttattattttgggtgcttctctatccatacaagcacctcctaacatgcttcataagtgacctcctcatcacaaggcctgaggtctcatttatccagtggcgccaagctaaactaaaactggtccgagtagactaaggcgaagagagaaggagagaagacagtttttttgtggccgcctgtgaacaatgaaaacgatgagggtgagatggagcaaaccatatggtttaaacagtcagaggagtacacgctgcttacataatggcgcaacgaccacatgtcccacagatacgcatcgattcgattcaaattaattaaaaggcgttgaaacagaatgagccagacagcaaggacaaggtggccaacagcaaggagtccaaaaagccctctattgacgagatccacgatgttattgctcatgaggtttccgagctcgatgctgggaagaagaagtgatttgtatataagaaataaatgagatatagtaaaggagtgcaagagaatggcaaggtggtcaaattctatattacttgcagtcactggttcctcgttgacatgaatgaagttaccgttggcatagctgatttaatatataactgtccaactaactctcacctagatataacccatgtgtgtgtttccaatcatcaatgcggccgcttactgagccttggcaccgggctgcttctcggccattcgagcgaactgggacaggtatcggagcaggatgacgagaccttcatggggcagagggtttcggtaggggaggttgtgcttctggcacagctgttccacctggtaggaaacggcagtgaggttgtgtcgaggcagggtgggccagagatggtgctcgatctggtagttcaggcctccaaagaaccagtcagtaatgatgcctcgtcgaatgttcatggtctcatggatctgacccacagagaagccatgtccgtcccagacggaatcaccgatcttctccagagggtagtggttcatgaagaccacgatggcaattccgaagccaccgacgagctcggaaacaaagaacaccagcatcgaggtcaggatggagggcataaagaagaggtggaacagggtcttgagagtccagtgcagagcgagtccaatggcctctttcttgtactgagatcggtagaactggttgtctcggtccttgagggatcgaacggtcagcacagactggaaacaccagatgaatcgcaggagaatacagatgaccaggaaatagtactgttggaactgaatgagctttcgggagatgggagaagctcgagtgacatcgtcctcggaccaggcgagcagaggcaggttatcaatgtcgggatcgtgaccctgaacgttggtagcagaatgatgggcgttgtgtctgtccttccaccaggtcacggagaagccctggagtccgttgccaaagaccagacccaggacgttattccagtttcggttcttgaaggtctggtggtggcagatgtcatgagacagccatcccatttgctggtagtgcataccgagcacgagagcaccaatgaagtacaggtggtactggaccagcatgaagaaggcaagcacgccaagacccagggtggtcaagatcttgtacgagtaccagaggggagaggcgtcaaacatgccagtggcgatcagctcttctcggagctttcggaaatcctcctgagcttcgttgacggcagcctggggaggcagctcggaagcctggttgatcttgggcattcgcttgagcttgtcgaaggcttcctgagagtgcataaccatgaaggcgtcagtagcatctcgtccctggtagttctcaatgatttcagctccaccagggtggaagttcacccaagcggagacgtcgtacacctttccgtcgatgacgaggggcagagcctgtcgagaagccttcaccatggccattgctgtagatatgtcttgtgtgtaagggggttggggtggttgtttgtgttcttgacttttgtgttagcaagggaagacgggcaaaaaagtgagtgtggttgggagggagagacgagccttatatataatgcttgtttgtgtttgtgcaagtggacgccgaaacgggcaggagccaaactaaacaaggcagacaatgcgagcttaattggattgcctgatgggcaggggttagggctcgatcaatgggggtgcgaagtgacaaaattgggaattaggttcgcaagcaaggctgacaagactttggcccaaacatttgtacgcggtggacaacaggagccacccatcgtctgtcacgggctagccggtcgtgcgtcctgtcaggctccacctaggctccatgccactccatacaatcccactagtgtaccgctaggccgcttttagctcccatctaagacccccccaaaacctccactgtacagtgcactgtactgtgtggcgatcaagggcaagggaaaaaaggcgcaaacatgcacgcatggaatgacgtaggtaaggcgttactagactgaaaagtggcacatttcggcgtgccaaagggtcctaggtgcgtttcgcgagctgggcgccaggccaagccgctccaaaacgcctctccgactccctccagcggcctccatatccccatccctctccacagcaatgttgttaagccttgcaaacgaaaaaatagaaaggctaataagcttccaatattgtggtgtacgctgcataacgcaacaatgagcgccaaacaacacacacacacagcacacagcagcattaaccacgatgtttaaacagtgtacgcagatcccgtcaacagttttatatatcgtagttacaaccatcaacactttttggtaagtgtaccattctatactccaactggtctgcaactgtacaagtagacatgttaatggtagttaataacatctacagcagaacctatggtaaagacattgcatttttacaggaagtatcgtcctacacgttgataaatccaaagatgcggaacttcttccacttttatcatcatcccctactcgtacactcgtactctttgttcgatcgcgattcatttctataaataatcttgtatgtacatgcggccgcttaagcaacgggcttgataacagcggggggggtgcccacgttgttgcggttgcggaagaacagaacacccttaccagcaccctcggcaccagcgctgggctcaacccactggcacatacgcgcactgcggtacatggcgcggatgaagccacgaggaccatcctggacatcagcccggtagtgcttgcccatgatgggcttaatggcctcggtggcctcgtccgcgttgtagaaggggatgctgctgacgtagtggtggaggacatgagtctcgatgatgccgtggagaaggtggcggccgatgaagcccatctcacggtcaatggtagcagcggcaccacggacgaagttccactcgtcgttggtgtagtggggaagggtagggtcggtgtgctggaggaaggtgatggcaacgagccagtggttaacccagaggtagggaacaaagtaccagatggccatgttgtagaaaccgaacttctgaacgaggaagtacagagcagtggccatcagaccgataccaatatcgctgaggacgatgagcttagcgtcactgttctcgtacagagggctgcggggatcgaagtggttaacaccaccgccgaggccgttatgcttgcccttgccgcgaccctcacgctggcgctcgtggtagttgtggccggtaacattggtgatgaggtagttgggccagccaacgagctgctgaaggacgagcatgagaagagtgaaagcgggggtctcctcagtaagatgagcgagctcgtgggtcatctttccgagacgagtagcctgctgctcgcgggttcggggaacgaagaccatgtcacgctccatgttgccagtggccttgtggtgctttcggtgggagatttgccagctgaagtaggggacaaggagggaagagtgaagaacccagccagtaatgtcgttgatgatgcgagaatcggagaaagcaccgtgaccgcactcatgggcaataacccagagaccagtaccgaaaagaccctgaagaacggtgtacacggcccacagaccagcgcgggcgggggtggaggggatatattcgggggtcacaaagttgtaccagatgctgaaagtggtagtcaggaggacaatgtcgcggaggatataaccgtatcccttgagagcggagcgcttgaagcagtgcttagggatggcattgtagatgtccttgatggtaaagtcgggaacctcgaactggttgccgtaggtgtcgagcatgacaccatactcggacttgggcttggcgatatcaacctcggacatggacgagagcgatgtggaagaggccgagtggcggggagagtctgaaggagagacggcggcagactcagaatccgtcacagtagttgaggtgacggtgcgtctaagcgcagggttctgcttgggcagagccgaagtggacgccatggttgtgaattagggtggtgagaatggttggttgtagggaagaatcaaaggccggtctcgggatccgtgggtatatatatatatatatatatatacgatccttcgttacctccctgttctcaaaactgtggtttttcgtttttcgttttttgctttttttgatttttttagggccaactaagcttccagatttcgctaatcacctttgtactaattacaagaaaggaagaagctgattagagttgggctttttatgcaactgtgctactccttatctctgatatgaaagtgtagacccaatcacatcatgtcatttagagttggtaatactgggaggatagataaggcacgaaaacgagccatagcagacatgctgggtgtagccaagcagaagaaagtagatgggagccaattgacgagcgagggagctacgccaatccgacatacgacacgctgagatcgtcttggccggggggtacctacagatgtccaagggtaagtgcttgactgtaattgtatgtctgaggacaaatatgtagtcagccgtataaagtcataccaggcaccagtgccatcatcgaaccactaactctctatgatacatgcctccggtattattgtaccatgcgtcgctttgttacatacgtatcttgcctttttctctcagaaactccagactttggctattggtcgagataagcccggaccatagtgagtctttcacactctacatttctcccttgctccaactatttaaattgccccggagaagacggccaggccgcctagatgacaaattcaacaactcacagctgactttctgccattgccactaggggggggcctttttatatggccaagccaagctctccacgtcggttgggctgcacccaacaataaatgggtagggttgcaccaacaaagggatgggatggggggtagaagatacgaggataacggggctcaatggcacaaataagaacgaatactgccattaagactcgtgatccagcgactgacaccattgcatcatctaagggcctcaaaactacctcggaactgctgcgctgatctggacaccacagaggttccgagcactttaggttgcaccaaatgtcccaccaggtgcaggcagaaaacgctggaacagcgtgtacagtttgtcttaacaaaaagtgagggcgctgaggtcgagcagggtggtgtgacttgttatagcctttagagctgcgaaagcgcgtatggatttggctcatcaggccagattgagggtctgtggacacatgtcatgttagtgtacttcaatcgccccctggatatagccccgacaataggccgtggcctcatttttttgccttccgcacatttccattgctcggtacccacaccttgcttctcctgcacttgccaaccttaatactggtttacattgaccaacatcttacaagcggggggcttgtctagggtatatataaacagtggctctcccaatcggttgccagtctcttttttcctttctttccccacagattcgaaatctaaactacacatcacagaattccgagccgtgagtatccacgacaagatcagtgtcgagacgacgcgttttgtgtaatgacacaatccgaaagtcgctagcaacacacactctctacacaaactaacccagctctggtaccatggtgaaggcttctcgacaggctctgcccctcgtcatcgacggaaaggtgtacgacgtctccgcttgggtgaacttccaccctggtggagctgaaatcattgagaactaccagggacgagatgctactgacgccttcatggttatgcactctcaggaagccttcgacaagctcaagcgaatgcccaagatcaaccaggcttccgagctgcctccccaggctgccgtcaacgaagctcaggaggatttccgaaagctccgagaagagctgatcgccactggcatgtttgacgcctctcccctctggtactcgtacaagatcttgaccaccctgggtcttggcgtgcttgccttcttcatgctggtccagtaccacctgtacttcattggtgctctcgtgctcggtatgcactaccagcaaatgggatggctgtctcatgacatctgccaccaccagaccttcaagaaccgaaactggaataacgtcctgggtctggtctttggcaacggactccagggcttctccgtgacctggtggaaggacagacacaacgcccatcattctgctaccaacgttcagggtcacgatcccgacattgataacctgcctctgctcgcctggtccgaggacgatgtcactcgagcttctcccatctcccgaaagctcattcagttccaacagtactatttcctggtcatctgtattctcctgcgattcatctggtgtttccagtctgtgctgaccgttcgatccctcaaggaccgagacaaccagttctaccgatctcagtacaagaaagaggccattggactcgctctgcactggactctcaagaccctgttccacctcttctttatgccctccatcctgacctcgatgctggtgttctttgtttccgagctcgtcggtggcttcggaattgccatcgtggtcttcatgaaccactaccctctggagaagatcggtgattccgtctgggacggacatggcttctctgtgggtcagatccatgagaccatgaacattcgacgaggcatcattactgactggttctttggaggcctgaactaccagatcgagcaccatctctggcccaccctgcctcgacacaacctcactgccgtttcctaccaggtggaacagctgtgccagaagcacaacctcccctaccgaaaccctctgccccatgaaggtctcgtcatcctgctccgatacctgtcccagttcgctcgaatggccgagaagcagcccggtgccaaggctcagtaagcggccgcaagtgtggatggggaagtgagtgcccggttctgtgtgcacaattggcaatccaagatggatggattcaacacagggatatagcgagctacgtggtggtgcgaggatatagcaacggatatttatgtttgacacttgagaatgtacgatacaagcactgtccaagtacaatactaaacatactgtacatactcatactcgtacccgggcaacggtttcacttgagtgcagtggctagtgctcttactcgtacagtgtgcaatactgcgtatcatagtctttgatgtatatcgtattcattcatgttagttgcgtacgggtgaagcttccactggtcggcgtggtagtggggcagagtggggtcggtgtgctgcaggtaggtgatggccacgagccagtggttgacccacaggtaggggatcaggtagtagagggtgacggaagccaggccccatcggttgatggagtatgcgatgacggacatggtgataccaataccgacgttagagatccagatgttgaaccagtccttcttctcaaacagcggggcgttggggttgaagtggttgacagcccatttgttgagcttggggtacttctgtccggtaacgtaagacagcagatacagaggccatccaaacacctgctgggtgatgaggccgtagagggtcatgaggggagcgtcctcagcaagctcagaccagtcatgggcgcctcggttctccataaactcctttcggtccttgggcacaaacaccatatcacgggtgaggtgaccagtggacttgtggtgcatggagtgggtcagcttccaggcgtagtaagggaccagcatggaggagtgcagaacccatccggtgacgttgttgacggtgttagagtcggagaaagcagagtggccacactcgtgggcaagaacccacagaccggtgccaaacagaccctggacaatggagtacatggcccaggccacagctcggccggaagccgagggaataagaggcaggtacgcgtaggccatgtaggcaaaaacggcgataaagaagcaggcgcgccagctgcattaatgaatcggccaacgcgcggggagaggcggtttgcgtattgggcgctcttccgcttcctcgctcactgactcgctgcgctcggtcgttcggctgcggcgagcggtatcagctcactcaaaggcggtaatacggttatccacagaatcaggggataacgcaggaaagaacatgtgagcaaaaggccagcaaaaggccaggaaccgtaaaaaggccgcgttgctggcgtttttccataggctccgcccccctgacgagcatcacaaaaatcgacgctcaagtcagaggtggcgaaacccgacaggactataaagataccaggcgtttccccctggaagctccctcgtgcgctctcctgttccgaccctgccgcttaccggatacctgtccgcctttctcccttcgggaagcgtggcgctttctcatagctcacgctgtaggtatctcagttcggtgtaggtcgttcgctccaagctgggctgtgtgcacgaaccccccgttcagcccgaccgctgcgccttatccggtaactatcgtcttgagtccaacccggtaagacacgacttatcgccactggcagcagccactggtaacaggattagcagagcgaggtatgtaggcggtgctacagagttcttgaagtggtggcctaactacggctacactagaagaacagtatttggtatctgcgctctgctgaagccagttaccttcggaaaaagagttggtagctcttgatccggcaaacaaaccaccgctggtagcggtggtttttttgtttgcaagcagcagattacgcgcagaaaaaaaggatctcaagaagatcctttgatcttttctacggggtctgacgctcagtggaacgaaaactcacgttaagggattttggtcatgagattatcaaaaaggatcttcacctagatccttttaaattaaaaatgaagttttaaatcaatctaaagtatatatgagtaaacttggtctgacagttaccaatgcttaatcagtgaggcacctatctcagcgatctgtctatttcgttcatccatagttgcctgactccccgtcgtgtagataactacgatacgggagggcttaccatctggccccagtgctgcaatgataccgcgagacccacgctcaccggctccagatttatcagcaataaaccagccagccggaagggccgagcgcagaagtggtcctgcaactttatccgcctccatccagtctattaattgttgccgggaagctagagtaagtagttcgccagttaatagtttgcgcaacgttgttgccattgctacaggcatcgtggtgtcacgctcgtcgtttggtatggcttcattcagctccggttcccaacgatcaaggcgagttacatgatcccccatgttgtgcaaaaaagcggttagctccttcggtcctccgatcgttgtcagaagtaagttggccgcagtgttatcactcatggttatggcagcactgcataattctcttactgtcatgccatccgtaagatgcttttctgtgactggtgagtactcaaccaagtcattctgagaatagtgtatgcggcgaccgagttgctcttgcccggcgtcaatacgggataataccgcgccacatagcagaactttaaaagtgctcatcattggaaaacgttcttcggggcgaaaactctcaaggatcttaccgctgttgagatccagttcgatgtaacccactcgtgcacccaactgatcttcagcatcttttactttcaccagcgtttctgggtgagcaaaaacaggaaggcaaaatgccgcaaaaaagggaataagggcgacacggaaatgttgaatactcatactcttcctttttcaatattattgaagcatttatcagggttattgtctcatgagcggatacatatttgaatgtatttagaaaaataaacaaataggggttccgcgcacatttccccgaaaagtgccacctgatgcggtgtgaaataccgcacagatgcgtaaggagaaaataccgcatcaggaaattgtaagcgttaatattttgttaaaattcgcgttaaatttttgttaaatcagctcattttttaaccaataggccgaaatcggcaaaatcccttataaatcaaaagaatagaccgagatagggttgagtgttgttccagtttggaacaagagtccactattaaagaacgtggactccaacgtcaaagggcgaaaaaccgtctatcagggcgatggcccactacgtgaaccatcaccctaatcaagttttttggggtcgaggtgccgtaaagcactaaatcggaaccctaaagggagcccccgatttagagcttgacggggaaagccggcgaacgtggcgagaaaggaagggaagaaagcgaaaggagcgggcgctagggcgctggcaagtgtagcggtcacgctgcgcgtaaccaccacacccgccgcgcttaatgcgccgctacagggcgcgtccattcgccattcaggctgcgcaactgttgggaagggcgatcggtgcgggcctcttcgctattacgccagctggcgaaagggggatgtgctgcaaggcgattaagttgggtaacgccagggttttcccagtcacgacgttgtaaaacgacggccagtgaattgtaatacgactcactatagggcgaattgggcccgacgtcgcatgcttgaatctacaagtaggagggttggagtgattaagtgaaacttctttaacggctctatgccagttctattgatatccgaaacatcagtatgaaggtctgataagggtgacttcttcccacagattcgtatcagtacgagtacgagaccggtacttgtaacagtattgatactaaagggaaactacaacggttgtcagcgtaatgtgacttcgcccatgaacgcagacacgcagtgccgagtgcggtgatatcgcctactcgttacgtccatggactacacaacccctcggcttcgcttggcttagcctcgggctcggtgctgttcagttaaaacacaatcaaataacatttctactttttagaaggcaggccgtcaggagcaactccgactccattgacgtttctaaacatctgaatgccttccttaccttcaacaaactggcaggttcgggcgacagtgtaaagagacttgatgaagttggtgtcgtcgtgtcggtagtgcttgcccatgaccttcttgatcttctcagtggcgattcgggcgttgtagaagggaattcctttacctgcaggataacttcgtataatgtatgctatacgaagttatgatctctctcttgagcttttccataacaagttcttctgcctccaggaagtccatgggtggtttgatcatggttttggtgtagtggtagtgcagtggtggtattgtgactggggatgtagttgagaataagtcatacacaagtcagctttcttcgagcctcatataagtataagtagttcaacgtattagcactgtacccagcatctccgtatcgagaaacacaacaacatgccccattggacagatcatgcggatacacaggttgtgcagtatcatacatactcgatcagacaggtcgtctgaccatcatacaagctgaacaagcgctccatacttgcacgctctctatatacacagttaaattacatatccatagtctaacctctaacagttaatcttctggtaagcctcccagccagccttctggtatcgcttggcctcctcaataggatctcggttctggccgtacagacctcggccgacaattatgatatccgttccggtagacatgacatcctcaacagttcggtactgctgtccgagagcgtctcccttgtcgtcaagacccaccccgggggtcagaataagccagtcctcagagtcgcccttaggtcggttctgggcaatgaagccaaccacaaactcggggtcggatcgggcaagctcaatggtctgcttggagtactcgccagtggccagagagcccttgcaagacagctcggccagcatgagcagacctctggccagcttctcgttgggagaggggactaggaactccttgtactgggagttctcgtagtcagagacgtcctccttcttctgttcagagacagtttcctcggcaccagctcgcaggccagcaatgattccggttccgggtacaccgtgggcgttggtgatatcggaccactcggcgattcggtgacaccggtactggtgcttgacagtgttgccaatatctgcgaactttctgtcctcgaacaggaagaaaccgtgcttaagagcaagttccttgagggggagcacagtgccggcgtaggtgaagtcgtcaatgatgtcgatatgggttttgatcatgcacacataaggtccgaccttatcggcaagctcaatgagctccttggtggtggtaacatccagagaagcacacaggttggttttcttggctgccacgagcttgagcactcgagcggcaaaggcggacttgtggacgttagctcgagcttcgtaggagggcattttggtggtgaagaggagactgaaataaatttagtctgcagaactttttatcggaaccttatctggggcagtgaagtatatgttatggtaatagttacgagttagttgaacttatagatagactggactatacggctatcggtccaaattagaaagaacgtcaatggctctctgggcgtcgcctttgccgacaaaaatgtgatcatgatgaaagccagcaatgacgttgcagctgatattgttgtcggccaaccgcgccgaaaacgcagctgtcagacccacagcctccaacgaagaatgtatcgtcaaagtgatccaagcacactcatagttggagtcgtactccaaaggcggcaatgacgagtcagacagatactcgtcgacgcgataacttcgtataatgtatgctatacgaagttatcgtacgatagttagtagacaacaat

SEQ ID NO: 205 - DNA, 1936 bp, Yarrowia lipolytica
  CDS (283)..(1539)
  ref <302>: TITLE: A  DELTA-12 DESATURASE GENE SUITABLE FOR ALTERING LEVELS OF POLYUNSATURATED FATTY ACIDS IN OLEAGINOUS YEASTS
  ref <310>: PATENT DOCUMENT NUMBER: U.S. 7,214,491
  ref <311>: PATENT FILING DATE: 2004-05-06
  ref <312>: PUBLICATION DATE: 2007-05-08
  ref <313>: RELEVANT RESIDUES IN SEQ ID NO: (1)..(1936)
  ref <302>: TITLE: A  DELTA-12 DESATURASE GENE SUITABLE FOR ALTERING LEVELS OF POLYUNSATURATED FATTY ACIDS IN OLEAGINOUS YEASTS
  ref <310>: PATENT DOCUMENT NUMBER: WO 2004/104167
  ref <311>: PATENT FILING DATE: 2004-05-07
  ref <312>: PUBLICATION DATE: 2004-12-02
  ref <313>: RELEVANT RESIDUES IN SEQ ID NO: (1)..(1936)
cgtagttatatacaagaggtagatgcgtgctggtgttagaggggctctcaggattaggaggaaaatttgacattggccctcaacatataacctcgggtgtgcctctgtttaccctcagcttttgcttgtccccaagtcagtcacgccaggccaaaaaggttggtggattgacagggagaaaaaaaaaagcctagtgggtttaaactcgaggtaagacattgaaatatataccggtcggcatcctgagtccctttctcgtattccaacagaccgaccatagaaatggattcgaccacgcagaccaacaccggcaccggcaaggtggccgtgcagccccccacggccttcattaagcccattgagaaggtgtccgagcccgtctacgacacctttggcaacgagttcactcctccagactactctatcaaggatattctggatgccattccccaggagtgctacaagcggtcctacgttaagtcctactcgtacgtggcccgagactgcttctttatcgccgtttttgcctacatggcctacgcgtacctgcctcttattccctcggcttccggccgagctgtggcctgggccatgtactccattgtccagggtctgtttggcaccggtctgtgggttcttgcccacgagtgtggccactctgctttctccgactctaacaccgtcaacaacgtcaccggatgggttctgcactcctccatgctggtcccttactacgcctggaagctgacccactccatgcaccacaagtccactggtcacctcacccgtgatatggtgtttgtgcccaaggaccgaaaggagtttatggagaaccgaggcgcccatgactggtctgagcttgctgaggacgctcccctcatgaccctctacggcctcatcacccagcaggtgtttggatggcctctgtatctgctgtcttacgttaccggacagaagtaccccaagctcaacaaatgggctgtcaaccacttcaaccccaacgccccgctgtttgagaagaaggactggttcaacatctggatctctaacgtcggtattggtatcaccatgtccgtcatcgcatactccatcaaccgatggggcctggcttccgtcaccctctactacctgatcccctacctgtgggtcaaccactggctcgtggccatcacctacctgcagcacaccgaccccactctgccccactaccacgccgaccagtggaacttcacccgaggagccgccgccaccatcgaccgagagtttggcttcatcggctccttctgcttccatgacatcatcgagacccacgttctgcaccactacgtgtctcgaattcccttctacaacgcccgaatcgccactgagaagatcaagaaggtcatgggcaagcactaccgacacgacgacaccaacttcatcaagtctctttacactgtcgcccgaacctgccagtttgttgaaggtaaggaaggcattcagatgtttagaaacgtcaatggagtcggagttgctcctgacggcctgccttctaaaaagtagagctagaaatgttatttgattgtgttttaactgaacagcaccgagcccgaggctaagccaagcgaagccgaggggttgtgtagtccatggacgtaacgagtaggcgatatcaccgcactcggcactgcgtgtctgcgttcatgggcgaagtcacattacgctgacaaccgttgtagtttccctttagtatcaatactgttacaagtaccggtctcgtactcgtactgatacgaatctgtgggaagaagtcacccttatcagaccttcatactgatgtttcggatatcaatagaactggcatagagccgttaaagaagtttcacttaatcactccaaccctcctacttgtagattcaagcagatcgataagatggatttgatggtcagtgctagc

SEQ ID NO: 206 - protein, 419 aa, Yarrowia lipolytica
MDSTTQTNTGTGKVAVQPPTAFIKPIEKVSEPVYDTFGNEFTPPDYSIKDILDAIPQECYKRSYVKSYSYVARDCFFIAVFAYMAYAYLPLIPSASGRAVAWAMYSIVQGLFGTGLWVLAHECGHSAFSDSNTVNNVTGWVLHSSMLVPYYAWKLTHSMHHKSTGHLTRDMVFVPKDRKEFMENRGAHDWSELAEDAPLMTLYGLITQQVFGWPLYLLSYVTGQKYPKLNKWAVNHFNPNAPLFEKKDWFNIWISNVGIGITMSVIAYSINRWGLASVTLYYLIPYLWVNHWLVAITYLQHTDPTLPHYHADQWNFTRGAAATIDREFGFIGSFCFHDIIETHVLHHYVSRIPFYNARIATEKIKKVMGKHYRHDDTNFIKSLYTVARTCQFVEGKEGIQMFRNVNGVGVAPDGLPSKK

SEQ ID NO: 207 - DNA, 1272 bp, Artificial Sequence
  mutant EgD8S-23 delta-8 desaturase
  CDS (2)..(1270)
catggtgaaggcttctcgacaggctctgcccctcgtcatcgacggaaaggtgtacgacgtctccgcttgggtgaacttccaccctggtggagctgaaatcattgagaactaccagggacgagatgctactgacgccttcatggttatgcactctcaggaagccttcgacaagctcaagcgaatgcccaagatcaaccaggcttccgagctgcctccccaggctgccgtcaacgaagctcaggaggatttccgaaagctccgagaagagctgatcgccactggcatgtttgacgcctctcccctctggtactcgtacaagatcttgaccaccctgggtcttggcgtgcttgccttcttcatgctggtccagtaccacctgtacttcattggtgctctcgtgctcggtatgcactaccagcaaatgggatggctgtctcatgacatctgccaccaccagaccttcaagaaccgaaactggaataacgtcctgggtctggtctttggcaacggactccagggcttctccgtgacctggtggaaggacagacacaacgcccatcattctgctaccaacgttcagggtcacgatcccgacattgataacctgcctctgctcgcctggtccgaggacgatgtcactcgagcttctcccatctcccgaaagctcattcagttccaacagtactatttcctggtcatctgtattctcctgcgattcatctggtgtttccagtctgtgctgaccgttcgatccctcaaggaccgagacaaccagttctaccgatctcagtacaagaaagaggccattggactcgctctgcactggactctcaagaccctgttccacctcttctttatgccctccatcctgacctcgatgctggtgttctttgtttccgagctcgtcggtggcttcggaattgccatcgtggtcttcatgaaccactaccctctggagaagatcggtgattccgtctgggacggacatggcttctctgtgggtcagatccatgagaccatgaacattcgacgaggcatcattactgactggttctttggaggcctgaactaccagatcgagcaccatctctggcccaccctgcctcgacacaacctcactgccgtttcctaccaggtggaacagctgtgccagaagcacaacctcccctaccgaaaccctctgccccatgaaggtctcgtcatcctgctccgatacctgtcccagttcgctcgaatggccgagaagcagcccggtgccaaggctcagtaagc

SEQ ID NO: 208 - protein, 422 aa, Artificial Sequence
  Synthetic Construct
MVKASRQALPLVIDGKVYDVSAWVNFHPGGAEIIENYQGRDATDAFMVMHSQEAFDKLKRMPKINQASELPPQAAVNEAQEDFRKLREELIATGMFDASPLWYSYKILTTLGLGVLAFFMLVQYHLYFIGALVLGMHYQQMGWLSHDICHHQTFKNRNWNNVLGLVFGNGLQGFSVTWWKDRHNAHHSATNVQGHDPDIDNLPLLAWSEDDVTRASPISRKLIQFQQYYFLVICILLRFIWCFQSVLTVRSLKDRDNQFYRSQYKKEAIGLALHWTLKTLFHLFFMPSILTSMLVFFVSELVGGFGIAIVVFMNHYPLEKIGDSVWDGHGFSVGQIHETMNIRRGIITDWFFGGLNYQIEHHLWPTLPRHNLTAVSYQVEQLCQKHNLPYRNPLPHEGLVILLRYLSQFARMAEKQPGAKAQ

SEQ ID NO: 209 - DNA, 777 bp, Euglena gracilis
  CDS (1)..(777): delta-9 elongase
  ref <302>: TITLE: DELTA-9 ELONGASES AND THEIR USE IN MAKING POLYUNSATURATED FATTY ACIDS
  ref <310>: PATENT DOCUMENT NUMBER: WO 2007/061742
  ref <311>: PATENT FILING DATE: 2006-11-16
  ref <312>: PUBLICATION DATE: 2007-05-31
  ref <313>: RELEVANT RESIDUES IN SEQ ID NO: (1)..(777)
  ref <302>: TITLE: DELTA-9 ELONGASES AND THEIR USE IN MAKING POLYUNSATURATED FATTY ACIDS
  ref <310>: PATENT DOCUMENT NUMBER: US 2007-0117190-A1
  ref <311>: PATENT FILING DATE: 2006-11-16
  ref <312>: PUBLICATION DATE: 2007-05-24
  ref <313>: RELEVANT RESIDUES IN SEQ ID NO: (1)..(777)
atggaggtggtgaatgaaatagtctcaattgggcaggaagttttacccaaagttgattatgcccaactctggagtgatgccagtcactgtgaggtgctttacttgtccatcgcatttgtcatcttgaagttcactcttggcccccttggtccaaaaggtcagtctcgtatgaagtttgttttcaccaattacaaccttctcatgtccatttattcgttgggatcattcctctcaatggcatatgccatgtacaccatcggtgttatgtctgacaactgcgagaaggcttttgacaacaacgtcttcaggatcaccacgcagttgttctatttgagcaagttcctggagtatattgactccttctatttgccactgatgggcaagcctctgacctggttgcaattcttccatcatttgggggcaccgatggatatgtggctgttctataattaccgaaatgaagctgtttggatttttgtgctgttgaatggtttcatccactggatcatgtacggttattattggaccagattgatcaagctgaagttccccatgccaaaatccctgattacatcaatgcagatcattcaattcaatgttggtttctacattgtctggaagtacaggaacattccctgttatcgccaagatgggatgaggatgtttggctggttcttcaattacttttatgttggcacagtcttgtgtttgttcttgaatttctatgtgcaaacgtatatcgtcaggaagcacaagggagccaaaaagattcagtga

SEQ ID NO: 210 - protein, 258 aa, Euglena gracilis; identical to SEQ ID NO: 199

SEQ ID NO: 211 - DNA, 13707 bp, Artificial Sequence
  Plasmid pZKSL-555R
aaacagtgtacgcagatctgcccatgatgggggctcccaccaccagcaatcagggccctgattacacacccacctgtaatgtcatgctgttcatcgtggttaatgctgctgtgtgctgtgtgtgtgtgttgtttggcgctcattgttgcgttatgcagcgtacaccacaatattggaagcttattagcctttctattttttcgtttgcaaggcttaacaacattgctgtggagagggatggggatatggaggccgctggagggagtcggagaggcgttttggagcggcttggcctggcgcccagctcgcgaaacgcacctaggaccctttggcacgccgaaatgtgccacttttcagtctagtaacgccttacctacgtcattccatgcgtgcatgtttgcgccttttttcccttgcccttgatcgccacacagtacagtgcactgtacagtggaggttttgggggggtcttagatgggagctaaaagcggcctagcggtacactagtgggattgtatggagtggcatggagcctaggtggagcctgacaggacgcacgaccggctagcccgtgacagacgatgggtggctcctgttgtccaccgcgtacaaatgtttgggccaaagtcttgtcagccttgcttgcgaacctaattcccaattttgtcacttcgcacccccattgatcgagccctaacccctgcccatcaggcaatccaattaagctcgcattgtctgccttgtttagtttggctcctgcccgtttcggcgtccacttgcacaaacacaaacaagcattatatataaggctcgtctctccctcccaaccacactcacttttttgcccgtcttcccttgctaacacaaaagtcaagaacacaaacaaccaccccaacccccttacacacaagacatatctacagcaatggccatggctctctcccttactaccgagcagctgctcgagcgacccgacctggttgccatcgacggcattctctacgatctggaaggtcttgccaaggtccatcccggaggcgacttgatcctcgcttctggtgcctccgatgcttctcctctgttctactccatgcacccttacgtcaagcccgagaactcgaagctgcttcaacagttcgtgcgaggcaagcacgaccgaacctccaaggacattgtctacacctacgactctccctttgcacaggacgtcaagcgaactatgcgagaggtcatgaaaggtcggaactggtatgccacacctggattctggctgcgaaccgttggcatcattgctgtcaccgccttttgcgagtggcactgggctactaccggaatggtgctgtggggtctcttgactggattcatgcacatgcagatcggcctgtccattcagcacgatgcctctcatggtgccatcagcaaaaagccctgggtcaacgctctctttgcctacggcatcgacgtcattggatcgtccagatggatctggctgcagtctcacatcatgcgacatcacacctacaccaatcagcatggtctcgacctggatgccgagtccgcagaaccattccttgtgttccacaactaccctgctgccaacactgctcgaaagtggtttcaccgattccaggcctggtacatgtacctcgtgcttggagcctacggcgtttcgctggtgtacaaccctctctacatcttccgaatgcagcacaacgacaccattcccgagtctgtcacagccatgcgagagaacggctttctgcgacggtaccgaacccttgcattcgttatgcgagctttcttcatctttcgaaccgccttcttgccctggtatctcactggaacctccctgctcatcaccattcctctggtgcccactgctaccggtgccttcctcaccttctttttcatcttgtctcacaacttcgatggctcggagcgaatccccgacaagaactgcaaggtcaagagctccgagaaggacgttgaagccgatcagatcgactggtacagagctcaggtggagacctcttccacctacggtggacccattgccatgttctttactggcggtctcaacttccagatcgagcatcacctctttcctcgaatgtcgtcttggcactatcccttcgtgcagcaagctgtccgagagtgttgcgaacgacacggagttcggtacgtcttctaccctaccattgtgggcaacatcatttccaccctcaagtacatgcacaaagtcggtgtggttcactgtgtcaaggacgctcaggattcctaagcggccgcaagtgtggatggggaagtgagtgcccggttctgtgtgcacaattggcaatccaagatggatggattcaacacagggatatagcgagctacgtggtggtgcgaggatatagcaacggatatttatgtttgacacttgagaatgtacgatacaagcactgtccaagtacaatactaaacatactgtacatactcatactcgtacccgggcaacggtttcacttgagtgcagtggctagtgctcttactcgtacagtgtgcaatactgcgtatcatagtctttgatgtatatcgtattcattcatgttagttgcgtacgctgtgttgttgtatgtggtgaagcttgacaatggatggtgtgtcgtatcaggctggggaacaattgtgcttaagtatgctgcagttgagtaagagtcatcgctccaccaaaataaagtttgccattagggttggagagagagatggtggctggaagaattaaatgacatcaagctgaggattgtgggtgtgcaataacacatgttaggggtgacctgtggctcgaaatctgataattattttgtaactttatgattattcttagattttttaatattcctctatataacacataagtagctgtcgtctagttgttcatagcctgactcctgcaatagattagtgcagagtgattttgtgcaattgagagccacggttgagtcaagtgactttgtgtgtgaagtcatcttacgtttcaagtctcacaggttactcaattggttggttgtctgccctttacagatatttacagtacctgagcgtaaagtcgttcatccacggaatgactgttcctgtcacgcagtcatgatcatggatgtggctggtcaggaaccattttggataggagacttagggattggactattattgaaaaaactgagccgaatatgatatagttctatttgaatgcagaacttctgatggtcaattcacttatttcaggcatatcggtcatggtggcagctgccacgatgttatctcgttggaaacctcggcgcgccagctgcattaatgaatcggccaacgcgcggggagaggcggtttgcgtattgggcgctcttccgcttcctcgctcactgactcgctgcgctcggtcgttcggctgcggcgagcggtatcagctcactcaaaggcggtaatacggttatccacagaatcaggggataacgcaggaaagaacatgtgagcaaaaggccagcaaaaggccaggaaccgtaaaaaggccgcgttgctggcgtttttccataggctccgcccccctgacgagcatcacaaaaatcgacgctcaagtcagaggtggcgaaacccgacaggactataaagataccaggcgtttccccctggaagctccctcgtgcgctctcctgttccgaccctgccgcttaccggatacctgtccgcctttctcccttcgggaagcgtggcgctttctcatagctcacgctgtaggtatctcagttcggtgtaggtcgttcgctccaagctgggctgtgtgcacgaaccccccgttcagcccgaccgctgcgccttatccggtaactatcgtcttgagtccaacccggtaagacacgacttatcgccactggcagcagccactggtaacaggattagcagagcgaggtatgtaggcggtgctacagagttcttgaagtggtggcctaactacggctacactagaagaacagtatttggtatctgcgctctgctgaagccagttaccttcggaaaaagagttggtagctcttgatccggcaaacaaaccaccgctggtagcggtggtttttttgtttgcaagcagcagattacgcgcagaaaaaaaggatctcaagaagatcctttgatcttttctacggggtctgacgctcagtggaacgaaaactcacgttaagggattttggtcatgagattatcaaaaaggatcttcacctagatccttttaaattaaaaatgaagttttaaatcaatctaaagtatatatgagtaaacttggtctgacagttaccaatgcttaatcagtgaggcacctatctcagcgatctgtctatttcgttcatccatagttgcctgactccccgtcgtgtagataactacgatacgggagggcttaccatctggccccagtgctgcaatgataccgcgagacccacgctcaccggctccagatttatcagcaataaaccagccagccggaagggccgagcgcagaagtggtcctgcaactttatccgcctccatccagtctattaattgttgccgggaagctagagtaagtagttcgccagttaatagtttgcgcaacgttgttgccattgctacaggcatcgtggtgtcacgctcgtcgtttggtatggcttcattcagctccggttcccaacgatcaaggcgagttacatgatcccccatgttgtgcaaaaaagcggttagctccttcggtcctccgatcgttgtcagaagtaagttggccgcagtgttatcactcatggttatggcagcactgcataattctcttactgtcatgccatccgtaagatgcttttctgtgactggtgagtactcaaccaagtcattctgagaatagtgtatgcggcgaccgagttgctcttgcccggcgtcaatacgggataataccgcgccacatagcagaactttaaaagtgctcatcattggaaaacgttcttcggggcgaaaactctcaaggatcttaccgctgttgagatccagttcgatgtaacccactcgtgcacccaactgatcttcagcatcttttactttcaccagcgtttctgggtgagcaaaaacaggaaggcaaaatgccgcaaaaaagggaataagggcgacacggaaatgttgaatactcatactcttcctttttcaatattattgaagcatttatcagggttattgtctcatgagcggatacatatttgaatgtatttagaaaaataaacaaataggggttccgcgcacatttccccgaaaagtgccacctgatgcggtgtgaaataccgcacagatgcgtaaggagaaaataccgcatcaggaaattgtaagcgttaatattttgttaaaattcgcgttaaatttttgttaaatcagctcattttttaaccaataggccgaaatcggcaaaatcccttataaatcaaaagaatagaccgagatagggttgagtgttgttccagtttggaacaagagtccactattaaagaacgtggactccaacgtcaaagggcgaaaaaccgtctatcagggcgatggcccactacgtgaaccatcaccctaatcaagttttttggggtcgaggtgccgtaaagcactaaatcggaaccctaaagggagcccccgatttagagcttgacggggaaagccggcgaacgtggcgagaaaggaagggaagaaagcgaaaggagcgggcgctagggcgctggcaagtgtagcggtcacgctgcgcgtaaccaccacacccgccgcgcttaatgcgccgctacagggcgcgtccattcgccattcaggctgcgcaactgttgggaagggcgatcggtgcgggcctcttcgctattacgccagctggcgaaagggggatgtgctgcaaggcgattaagttgggtaacgccagggttttcccagtcacgacgttgtaaaacgacggccagtgaattgtaatacgactcactatagggcgaattgggcccgacgtcgcatgcattccatagccacacctttgcctatggcttcacaaccgaaggcaattcgagaggtcgcgcttatggaatcgactcgtataaagctgaagggaaagggagacgttccgagcgctcagatgcaatagtcgtccagctaatgtggattcaaaaacaaccccaacagtaatcttgaaaatttgaacggatcaatctgaacactcttgctccaggtcattcttctaacgcacatccccagagtctagagggagttgtgttgtgaacatcctaataaacaatgcaatggattcgggatatcttctgtctcgccccctactcgatgtcgagtaaaccgatcaccaactaacaatactcctccgcgttctgccattgactctcaaacagacatcgctatcaacggaacagcatattttagcttcttaggacaataaatattgataatgccggctctccctcggtatattaagcaatccattcatacactcattcatcaggttaattttatatatataatttgtctattcaaacaccgtaaattactggtaccatcatctcctccttttcaaatacacgtctatttgcattaatgaaattactcgccaattcgcagaacgtgtttgtcgaacagagccttagctcgggtccagacaggagcagtgtctcgctgaggaagctgcaggagagttaattaactcacctgcaggattgagactatgaatggattcccgtgcccgtattactctactaatttgatcttggaacgcgaaaatacgtttctaggactccaaagaatctcaactcttgtccttactaaatatactacccatagttgatggtttacttgaacagagaggacatgttcacttgacccaaagtttctcgcatctcttggatatttgaacaacggcgtccactgaccgtcagttatccagtcacaaaacccccacattcatacattcccatgtacgtttacaaagttctcaattccatcgtgcaaatcaaaatcacatctattcattcatcatatataaacccatcatgtctactaacactcacaactccatagaaaacatcgactcagaacacacgctccatgcggccgcttaggaatcctgtgcgtccttcacgcagtggacgacacccaccttatgcatgtacttcagggtggagatgatgttgccgacgatggtagggtagaaaacatatcgcactccatgtcgttcgcaacactcccggaccgcctgctggacgaaggggtagtgccaagacgacatccggggaaagaggtggtgctcgatctggaaattgagaccgccagtgaagaacatggcgatggggccaccgtatgtggaggacgtctccacctgcgcccgataccagtcaatttggtcagcctcaacgtccttctcagatcgcttaaccttgcagttcttgtcggggatccgttcggagccatcaaaattgtgggacaaaatgaagaagaacgtcaagaaggcaccagttgcggtgggcaccagaggaatggtgatcagcaatgaggtcccagtgaggtaccagggcaagaatgcggtccggaagatgaagaaagctcgcatcacgaatgcaagtgtgcggtagcgccgcagaaagccattttcccgcatggccgtgacagactctgggatggtgtcattgtgctgcatccggaaaatgtagagcgggttgtacaccagcgataccccgtatgcccccagcacaaggtacatgtaccaagcctggaagcggtggaaccactttcgggcggtgtttgcggcggggtagttgtggaacaccaggaacggctctgccgactccgcatccaggtcgaggccgtgctggttggtgtaggtgtggtgccgcatgatgtgcgactgcagccaaatccaccgggacgatccgatgacgtcaatgccgtaggcgaagagggcgttgacccaaggcttcttgctgatggccccgtgggacgcatcatgctggatggataagccgatctgcatgtgcatgaatccagtcaacaggccccacagcaccatccccgtggtagcccagtgccactcgcaaaaggccgtcacggcgatgatcccaacggtgcgcagccagaagccaggggttgcgtaccagttcctccctttcatcacctcgcgcattgtccgcttaacgtcttgtgcgaagggagaatcatacgtgtagacaatgtccttcgaggtgcggtcatgcttccctcggacgaactgttgaagcaatttggagttctccggtttgacgtatggatgcattgaataaaagagaggggaggcatcagaggcaccagaagcgagaatcaaatctcctcctggatgaactttggcaagcccttcaaggtcgtagaggatgccatcaatcgcaaccaaatcagggcgttctaacagctgttctgtggtaagactgagagccatggagagctgggttagtttgtgtagagagtgtgtgttgctagcgactttcggattgtgtcattacacaaaacgcgtcgtctcgacactgatcttgtcgtggatactcacggctcggacatcgtcgccgacgatgacaccggactttcgcttaaggacgtcagtaacaggcattgtgtgatgtgtagtttagatttcgaatctgtggggaaagaaaggaaaaaagagactggcaaccgattgggagagccactgtttatatataccctagacaagccccccgcttgtaagatgttggtcaatgtaaaccagtattaaggttggcaagtgcaggagaagcaaggtgtgggtaccgagcaatggaaatgtgcggaaggcaaaaaaatgaggccacggcctattgtcggggctatatccagggggcgattgaagtacactaacatgacatgtgtccacagaccctcaatctggcctgatgagccaaatccatacgcgctttcgcagctctaaaggctataacaagtcacaccaccctgctcgacctcagcgccctcactttttgttaagacaaactgtacacgctgttccagcgttttctgcctgcacctggtgggacatttggtgcaacctaaagtgctcggaacctctgtggtgtccagatcagcgcagcagttccgaggtagttttgaggcccttagatgatgcaatggtgtcagtcgctggatcacgagtcttaatggcagtattcgttcttatttgtgccattgagccccgttatcctcgtatcttctaccccccatcccatccctttgttggtgcaaccctacccatttattgttgggtgcagcccaaccgacgtggagagcttggcttggccatataaaaaggcccccccctagtggcaatggcagaaagtcagctgtgagttgttgaatttgtcatctaggcggcctggccgtcttctccggggcaattggggctgttttttgggacacaaatacgccgccaacccggtctctcctgaattccgtcgtcgcctgagtcgacatcatttatttaccagttggccacaaacccttgacgatctcgtatgtcccctccgacatactcccggccggctggggtacgttcgatagcgctatcggcatcgacaaggtttgggtccctagccgataccgcactacctgagtcacaatcttcggaggtttagtcttccacatagcacgggcaaaagtgcgtatatatacaagagcgtttgccagccacagattttcactccacacaccacatcacacatacaaccacacacatccacaatggaacccgaaactaagaagaccaagactgactccaagaagattgttcttctcggcggcgacttctgtggccccgaggtgattgccgaggccgtcaaggtgctcaagtctgttgctgaggcctccggcaccgagtttgtgtttgaggaccgactcattggaggagctgccattgagaaggagggcgagcccatcaccgacgctactctcgacatctgccgaaaggctgactctattatgctcggtgctgtcggaggcgctgccaacaccgtatggaccactcccgacggacgaaccgacgtgcgacccgagcagggtctcctcaagctgcgaaaggacctgaacctgtacgccaacctgcgaccctgccagctgctgtcgcccaagctcgccgatctctcccccatccgaaacgttgagggcaccgacttcatcattgtccgagagctcgtcggaggtatctactttggagagcgaaaggaggatgacggatctggcgtcgcttccgacaccgagacctactccgttcctgaggttgagcgaattgcccgaatggccgccttcctggcccttcagcacaacccccctcttcccgtgtggtctcttgacaaggccaacgtgctggcctcctctcgactttggcgaaagactgtcactcgagtcctcaaggacgaactcccccagctcgagctcaaccaccagctgatcgactcggccgccatgatcctcatcaagcagccctccaagatgaatggtatcatcatcaccaccaacatgtttggcgatatcatctccgacgaggcctccgtcatccccggttctctgggtctgctgccctccgcctctctggcttctctgcccgacaccaacgaggcgttcggtctgtacgagccctgtcacggatctgcccccgatctcggcaagcagaaggtcaaccccattgccaccattctgtctgccgccatgatgctcaagttctctcttaacatgaagcccgccggtgacgctgttgaggctgccgtcaaggagtccgtcgaggctggtatcactaccgccgatatcggaggctcttcctccacctccgaggtcggagacttgttgccaacaaggtcaaggagctgctcaagaaggagtaagtcgtttctacgacgcattgatggaaggagcaaactgacgcgcctgcgggttggtctaccggcagggtccgctagtgtataagactctataaaaagggccctgccctgctaatgaaatgatgatttataatttaccggtgtagcaaccttgactagaagaagcagattgggtgtgtttgtagtggaggacagtggtacgttttggaaacagtcttcttgaaagtgtcttgtctacagtatattcactcataacctcaatagccaagggtgtagtcggtttattaaaggaagggagttgtggctgatgtggatatcgatagttggagcaagggagaaatgtagagtgtgaaagactcactatggtccgggcttatctcgaccaatagccaaagtctggagtttctgagagaaaaaggcaagatacgtatgtaacaaagcgacgcatggtacaataataccggaggcatgtatcatagagagttagtggttcgatgatggcactggtgcctggtatgactttatacggctgactacatatttgtcctcagacatacaattacagtcaagcacttacccttggacatctgtaggtaccccccggccaagacgatctcagcgtgtcgtatgtcggattggcgtagctccctcgctcgtcaattggctcccatctactttcttctgcttggctacacccagcatgtctgctatggctcgttttcgtgccttatctatcctcccagtattaccaactctaaatgacatgatgtgattgggtctacactttcatatcagagataaggagtagcacagttgcataaaaagcccaactctaatcagcttcttcctttcttgtaattagtacaaaggtgattagcgaaatctggaagcttagttggccctaaaaaaatcaaaaaaagcaaaaaacgaaaaacgaaaaaccacagttttgagaacagggaggtaacgaaggatcgtatatatatatatatatatatatacccacggatcccgagaccggcctttgattcttccctacaaccaaccattctcaccaccctaattcacaaccatggctcccgacgccgacaagctgcgacagcgaaaggctcagtccatccaggacactgccgattctcaggctaccgagctcaagattggcaccctgaagggtctccaaggcaccgagatcgtcattgatggcgacatctacgacatcaaagacttcgatcaccctggaggcgaatccatcatgacctttggtggcaacgacgttactgccacctacaagatgattcatccctaccactcgaagcatcacctggagaagatgaaaaaggtcggtcgagtgcccgactacacctccgagtacaagttcgatactcccttcgaacgagagatcaaacaggaggtcttcaagattgtgcgaagaggtcgagagtttggaacacctggctacttctttcgagccttctgctacatcggtctcttcttttacctgcagtatctctgggttaccactcctaccactttcgcccttgctatcttctacggtgtgtctcaggccttcattggcctgaacgtccagcacgacgccaaccacggagctgcctccaaaaagccctggatcaacaatttgctcggcctgggtgccgactttatcggaggctccaagtggctctggatgaaccagcactggacccatcacacttacaccaaccatcacgagaaggatcccgacgccctgggtgcagagcctatgctgctcttcaacgactatcccttgggtcaccccaagcgaaccctcattcatcacttccaagccttctactatctgtttgtccttgctggctactgggtgtcttcggtgttcaaccctcagatcctggacctccagcaccgaggtgcccaggctgtcggcatgaagatggagaacgactacattgccaagtctcgaaagtacgctatcttcctgcgactcctgtacatctacaccaacattgtggctcccatccagaaccaaggcttttcgctcaccgtcgttgctcacattcttactatgggtgtcgcctccagcctgaccctcgctactctgttcgccctctcccacaacttcgagaacgcagatcgggatcccacctacgaggctcgaaagggaggcgagcctgtctgttggttcaagtcgcaggtggaaacctcctctacttacggtggcttcatttccggttgccttacaggcggactcaactttcaggtcgagcatcacctgtttcctcgaatgtcctctgcctggtacccctacatcgctcctaccgttcgagaggtctgcaaaaagcacggcgtcaagtacgcctactatccctgggtgtggcagaacctcatctcgaccgtcaagtacctgcatcagtccggaactggctcgaactggaagaacggtgccaatccctactctggcaagctgtaagcggccgcatgtacatacaagattatttatagaaatgaatcgcgatcgaacaaagagtacgagtgtacgagtaggggatgatgataaaagtggaagaagttccgcatctttggatttatcaacgtgtaggacgatacttcctgtaaaaatgcaatgtctttaccataggttctgctgtagatgttattaactaccattaacatgtctacttgtacagttgcagaccagttggagtatagaatggtacacttaccaaaaagtgttgatggttgtaactacgatatataaaactgttgacgggatctgcgtacactgttt

SEQ ID NO: 212 - DNA, 1350 bp, Euglena gracilis
  CDS (1)..(1350): synthetic delta-5 desaturase (codon-optimized for Yarrowia lipolytica)
atggctctctcccttactaccgagcagctgctcgagcgacccgacctggttgccatcgacggcattctctacgatctggaaggtcttgccaaggtccatcccggaggcgacttgatcctcgcttctggtgcctccgatgcttctcctctgttctactccatgcacccttacgtcaagcccgagaactcgaagctgcttcaacagttcgtgcgaggcaagcacgaccgaacctccaaggacattgtctacacctacgactctccctttgcacaggacgtcaagcgaactatgcgagaggtcatgaaaggtcggaactggtatgccacacctggattctggctgcgaaccgttggcatcattgctgtcaccgccttttgcgagtggcactgggctactaccggaatggtgctgtggggtctcttgactggattcatgcacatgcagatcggcctgtccattcagcacgatgcctctcatggtgccatcagcaaaaagccctgggtcaacgctctctttgcctacggcatcgacgtcattggatcgtccagatggatctggctgcagtctcacatcatgcgacatcacacctacaccaatcagcatggtctcgacctggatgccgagtccgcagaaccattccttgtgttccacaactaccctgctgccaacactgctcgaaagtggtttcaccgattccaggcctggtacatgtacctcgtgcttggagcctacggcgtttcgctggtgtacaaccctctctacatcttccgaatgcagcacaacgacaccattcccgagtctgtcacagccatgcgagagaacggctttctgcgacggtaccgaacccttgcattcgttatgcgagctttcttcatctttcgaaccgccttcttgccctggtatctcactggaacctccctgctcatcaccattcctctggtgcccactgctaccggtgccttcctcaccttctttttcatcttgtctcacaacttcgatggctcggagcgaatccccgacaagaactgcaaggtcaagagctccgagaaggacgttgaagccgatcagatcgactggtacagagctcaggtggagacctcttccacctacggtggacccattgccatgttctttactggcggtctcaacttccagatcgagcatcacctctttcctcgaatgtcgtcttggcactatcccttcgtgcagcaagctgtccgagagtgttgcgaacgacacggagttcggtacgtcttctaccctaccattgtgggcaacatcatttccaccctcaagtacatgcacaaagtcggtgtggttcactgtgtcaaggacgctcaggattcctaa

SEQ ID NO: 213 - protein, 449 aa, Euglena gracilis
MALSLTTEQLLERPDLVAIDGILYDLEGLAKVHPGGDLILASGASDASPLFYSMHPYVKPENSKLLQQFVRGKHDRTSKDIVYTYDSPFAQDVKRTMREVMKGRNWYATPGFWLRTVGIIAVTAFCEWHWATTGMVLWGLLTGFMHMQIGLSIQHDASHGAISKKPWVNALFAYGIDVIGSSRWIWLQSHIMRHHTYTNQHGLDLDAESAEPFLVFHNYPAANTARKWFHRFQAWYMYLVLGAYGVSLVYNPLYIFRMQHNDTIPESVTAMRENGFLRRYRTLAFVMRAFFIFRTAFLPWYLTGTSLLITIPLVPTATGAFLTFFFILSHNFDGSERIPDKNCKVKSSEKDVEADQIDWYRAQVETSSTYGGPIAMFFTGGLNFQIEHHLFPRMSSWHYPFVQQAVRECCERHGVRYVFYPTIVGNIISTLKYMHKVGVVHCVKDAQDS

SEQ ID NO: 214 - DNA, 1392 bp, Peridinium sp. CCMP626
  CDS (1)..(1392): synthetic delta-5 desaturase (codon-optimized for Yarrowia lipolytica)
atggctcccgacgccgacaagctgcgacagcgaaaggctcagtccatccaggacactgccgattctcaggctaccgagctcaagattggcaccctgaagggtctccaaggcaccgagatcgtcattgatggcgacatctacgacatcaaagacttcgatcaccctggaggcgaatccatcatgacctttggtggcaacgacgttactgccacctacaagatgattcatccctaccactcgaagcatcacctggagaagatgaaaaaggtcggtcgagtgcccgactacacctccgagtacaagttcgatactcccttcgaacgagagatcaaacaggaggtcttcaagattgtgcgaagaggtcgagagtttggaacacctggctacttctttcgagccttctgctacatcggtctcttcttttacctgcagtatctctgggttaccactcctaccactttcgcccttgctatcttctacggtgtgtctcaggccttcattggcctgaacgtccagcacgacgccaaccacggagctgcctccaaaaagccctggatcaacaatttgctcggcctgggtgccgactttatcggaggctccaagtggctctggatgaaccagcactggacccatcacacttacaccaaccatcacgagaaggatcccgacgccctgggtgcagagcctatgctgctcttcaacgactatcccttgggtcaccccaagcgaaccctcattcatcacttccaagccttctactatctgtttgtccttgctggctactgggtgtcttcggtgttcaaccctcagatcctggacctccagcaccgaggtgcccaggctgtcggcatgaagatggagaacgactacattgccaagtctcgaaagtacgctatcttcctgcgactcctgtacatctacaccaacattgtggctcccatccagaaccaaggcttttcgctcaccgtcgttgctcacattcttactatgggtgtcgcctccagcctgaccctcgctactctgttcgccctctcccacaacttcgagaacgcagatcgggatcccacctacgaggctcgaaagggaggcgagcctgtctgttggttcaagtcgcaggtggaaacctcctctacttacggtggcttcatttccggttgccttacaggcggactcaactttcaggtcgagcatcacctgtttcctcgaatgtcctctgcctggtacccctacatcgctcctaccgttcgagaggtctgcaaaaagcacggcgtcaagtacgcctactatccctgggtgtggcagaacctcatctcgaccgtcaagtacctgcatcagtccggaactggctcgaactggaagaacggtgccaatccctactctggcaagctgtaa

SEQ ID NO: 215 - protein, 463 aa, Peridinium sp. CCMP626
MAPDADKLRQRKAQSIQDTADSQATELKIGTLKGLQGTEIVIDGDIYDIKDFDHPGGESIMTFGGNDVTATYKMIHPYHSKHHLEKMKKVGRVPDYTSEYKFDTPFEREIKQEVFKIVRRGREFGTPGYFFRAFCYIGLFFYLQYLWVTTPTTFALAIFYGVSQAFIGLNVQHDANHGAASKKPWINNLLGLGADFIGGSKWLWMNQHWTHHTYTNHHEKDPDALGAEPMLLFNDYPLGHPKRTLIHHFQAFYYLFVLAGYWVSSVFNPQILDLQHRGAQAVGMKMENDYIAKSRKYAIFLRLLYIYTNIVAPIQNQGFSLTVVAHILTMGVASSLTLATLFALSHNFENADRDPTYEARKGGEPVCWFKSQVETSSTYGGFISGCLTGGLNFQVEHHLFPRMSSAWYPYIAPTVREVCKKHGVKYAYYPWVWQNLISTVKYLHQSGTGSNWKNGANPYSGKL

SEQ ID NO: 216 - DNA, 1350 bp, Euglena gracilis
  CDS (1)..(1350): delta-5 desaturase
atggctctcagtcttaccacagaacagctgttagaacgccctgatttggttgcgattgatggcatcctctacgaccttgaagggcttgccaaagttcatccaggaggagatttgattctcgcttctggtgcctctgatgcctcccctctcttttattcaatgcatccatacgtcaaaccggagaattccaaattgcttcaacagttcgtccgagggaagcatgaccgcacctcgaaggacattgtctacacgtatgattctcccttcgcacaagacgttaagcggacaatgcgcgaggtgatgaaagggaggaactggtacgcaacccctggcttctggctgcgcaccgttgggatcatcgccgtgacggccttttgcgagtggcactgggctaccacggggatggtgctgtggggcctgttgactggattcatgcacatgcagatcggcttatccatccagcatgatgcgtcccacggggccatcagcaagaagccttgggtcaacgccctcttcgcctacggcattgacgtcatcggatcgtcccggtggatttggctgcagtcgcacatcatgcggcaccacacctacaccaaccagcacggcctcgacctggatgcggagtcggcagagccgttcctggtgttccacaactaccccgccgcaaacaccgcccgaaagtggttccaccgcttccaagcttggtacatgtaccttgtgctgggggcatacggggtatcgctggtgtacaacccgctctacattttccggatgcagcacaatgacaccatcccagagtctgtcacggccatgcgggagaatggctttctgcggcgctaccgcacacttgcattcgtgatgcgagctttcttcatcttccggaccgcattcttgccctggtacctcactgggacctcattgctgatcaccattcctctggtgcccactgcaactggtgccttcttgacgttcttcttcattttgtcccacaattttgatggctccgaacggatccccgacaagaactgcaaggttaagagctctgagaaggacgttgaggctgaccaaattgactggtatcgggcgcaggtggagacgtcctccacatacggtggccccatcgccatgttcttcactggcggtctcaatttccagatcgagcaccacctctttccccggatgtcgtcttggcactaccccttcgtccagcaggcggtccgggagtgttgcgaacgccatggagtgcgatatgttttctaccctaccatcgtcggcaacatcatctccaccctgaagtacatgcataaggtgggtgtcgtccactgcgtgaaggacgcacaggattcctga

SEQ ID NO: 217 - protein, 449 aa, Euglena gracilis; identical to SEQ ID NO: 213

SEQ ID NO: 218 - DNA, 13066 bp, Artificial Sequence
  Plasmid pZP3-Pa777U
tctcggtctattcttttgatttataagggattttgccgatttcggcctattggttaaaaaatgagctgatttaacaaaaatttaacgcgaattttaacaaaatattaacgcttacaatttcctgatgcggtattttctccttacgcatctgtgcggtatttcacaccgcatcaggtggcacttttcggggaaatgtgcgcggaacccctatttgtttatttttctaaatacattcaaatatgtatccgctcatgagacaataaccctgataaatgcttcaataatattgaaaaaggaagagtatgagtattcaacatttccgtgtcgcccttattcccttttttgcggcattttgccttcctgtttttgctcacccagaaacgctggtgaaagtaaaagatgctgaagatcagttgggtgcacgagtgggttacatcgaactggatctcaacagcggtaagatccttgagagttttcgccccgaagaacgttttccaatgatgagcacttttaaagttctgctatgtggcgcggtattatcccgtattgacgccgggcaagagcaactcggtcgccgcatacactattctcagaatgacttggttgagtactcaccagtcacagaaaagcatcttacggatggcatgacagtaagagaattatgcagtgctgccataaccatgagtgataacactgcggccaacttacttctgacaacgatcggaggaccgaaggagctaaccgcttttttgcacaacatgggggatcatgtaactcgccttgatcgttgggaaccggagctgaatgaagccataccaaacgacgagcgtgacaccacgatgcctgtagcaatggcaacaacgttgcgcaaactattaactggcgaactacttactctagcttcccggcaacaattaatagactggatggaggcggataaagttgcaggaccacttctgcgctcggcccttccggctggctggtttattgctgataaatctggagccggtgagcgtgggtctcgcggtatcattgcagcactggggccagatggtaagccctcccgtatcgtagttatctacacgacggggagtcaggcaactatggatgaacgaaatagacagatcgctgagataggtgcctcactgattaagcattggtaactgtcagaccaagtttactcatatatactttagattgatttaaaacttcatttttaatttaaaaggatctaggtgaagatcctttttgataatctcatgaccaaaatcccttaacgtgagttttcgttccactgagcgtcagaccccgtagaaaagatcaaaggatcttcttgagatcctttttttctgcgcgtaatctgctgcttgcaaacaaaaaaaccaccgctaccagcggtggtttgtttgccggatcaagagctaccaactctttttccgaaggtaactggcttcagcagagcgcagataccaaatactgttcttctagtgtagccgtagttaggccaccacttcaagaactctgtagcaccgcctacatacctcgctctgctaatcctgttaccagtggctgctgccagtggcgataagtcgtgtcttaccgggttggactcaagacgatagttaccggataaggcgcagcggtcgggctgaacggggggttcgtgcacacagcccagcttggagcgaacgacctacaccgaactgagatacctacagcgtgagctatgagaaagcgccacgcttcccgaagggagaaaggcggacaggtatccggtaagcggcagggtcggaacaggagagcgcacgagggagcttccagggggaaacgcctggtatctttatagtcctgtcgggtttcgccacctctgacttgagcgtcgatttttgtgatgctcgtcaggggggcggagcctatggaaaaacgccagcaacgcggcctttttacggttcctggccttttgctggccttttgctcacatgttctttcctgcgttatcccctgattctgtggataaccgtattaccgcctttgagtgagctgataccgctcgccgcagccgaacgaccgagcgcagcgagtcagtgagcgaggaagcggaagagcgcccaatacgcaaaccgcctctccccgcgcgttggccgattcattaatgcagctggcgcgccaccaatcacaattctgaaaagcacatcttgatctcctcattgcggggagtccaacggtggtcttattcccccgaatttcccgctcaatctcgttccagaccgacccggacacagtgcttaacgccgttccgaaactctaccgcagatatgctccaacggactgggctgcatagatgtgatcctcggcttggagaaatggataaaagccggccaaaaaaaaagcggaaaaaagcggaaaaaaagagaaaaaaaatcgcaaaatttgaaaaatagggggaaaagacgcaaaaacgcaaggaggggggagtatatgacactgataagcaagctcacaacggttcctcttatttttttcctcatcttctgcctaggttcccaaaatcccagatgcttctctccagtgccaaaagtaagtaccccacaggttttcggccgaaaattccacgtgcagcaacgtcgtgtggggtgttaaaatgtggggggggggaaccaggacaagaggctcttgtgggagccgaatgagagcacaaagcgggcgggtgtgataagggcatttttgcccattttcccttctcctgtctctccgacggtgatggcgttgtgcgtcctctatttctttttatttctttttgttttatttctctgactaccgatttggtttgatttcctcaaccccacacaaataagctcgggccgaggaatatatatatacacggacacagtcgccctgtggacaacacgtcactacctctacgatacacaccgtacgttgtgtggaagcttgtgagcggataacaatttcacacaggaaacagctatgaccatgattacgccaagctcgaaattaaccctcactaaagggaacaaaagctggagctccaccgcggacacaatatctggtcaaatttcagtttcgttacatttaaattccttcacttcaagttcattcttcatctgcttctgttttactttgacaggcaaatgaagacatggtacgacttgatggaggccaagaacgccatttcaccccgagacaccgaagtgcctgaaatcctggctgcccccattgataacatcggaaactacggtattccggaaagtgtatatagaacctttccccagcttgtgtctgtggatatggatggtgtaatcccctttgagtactcgtcttggcttctctccgagcagtatgaggctctctaatctagcgcatttaatatctcaatgtatttatatatttatcttctcatgcggccgcttagttggctttggtcttggcagccttggcctccttgagggtaaacatcttggcatccttgtcgaccacgccgtacttggcgtacataagaccaattcggatgaaggtgggaatgatgggagaagccgactttcgcaccagttcgggaaaggcctgagcgaaggcagcagtggcctcgttgagcttgtagtgaggaatgatgggaaacagatggtggatctgatgtgtaccaatgttgtgggacaggttgtcgatgagggctccgtagcttcggtccacagaggacaagttgcccttgacataggtccactccgaatcggcgtaccagggagtttcctcgtcgttgtgatggaggaaggtagtgacaaccagcatggtggcgaatccaaagagaggtgcgaagtaatacagagccatggtcttgaggccgtagacgtaggtaaggtaggcgtacagaccagcaaaggccacgagagagccgagggaaatgatgacggcagacattcttcgcaggtagagaggctcccagggattgaagtggttgacctttcggggaggaaatccagcaacgaggtaggcaaaccaagccgaaccaagggagatgaccatgtgtcgggacaggggatgagagtcggcttctcgctgagggtagaagatctcatccttgtcgatgttgccggtgttcttgtgatggtgtcgatggctgatcttccacgactcgtagggagtcagaatgatggagtgaatgagtgtgccaacagagaagttgagcaggtgggatcgcgagaaggcaccatgtccacagtcgtgaccgatggtaaagaatccccagaacacgataccctggagcagaatgtagccagtgcaaaggacggcatcgagcagtgcaaactcctgcacgatagcaagggctcgagcatagtacagtccgagagcaagggaaccggcaatgcccagagctcgcacggtatagtagagggaccagggaacagaggcttcgaagcagtgggcaggcagggatcgcttgatctcggtgagagtagggaactcgtagggagcggcaacggtagaggaagccatggttgtgaattagggtggtgagaatggttggttgtagggaagaatcaaaggccggtctcgggatccgtgggtatatatatatatatatatatatacgatccttcgttacctccctgttctcaaaactgtggtttttcgtttttcgttttttgctttttttgatttttttagggccaactaagcttccagatttcgctaatcacctttgtactaattacaagaaaggaagaagctgattagagttgggctttttatgcaactgtgctactccttatctctgatatgaaagtgtagacccaatcacatcatgtcatttagagttggtaatactgggaggatagataaggcacgaaaacgagccatagcagacatgctgggtgtagccaagcagaagaaagtagatgggagccaattgacgagcgagggagctacgccaatccgacatacgacacgctgagatcgtcttggccggggggtacctacagatgtccaagggtaagtgcttgactgtaattgtatgtctgaggacaaatatgtagtcagccgtataaagtcataccaggcaccagtgccatcatcgaaccactaactctctatgatacatgcctccggtattattgtaccatgcgtcgctttgttacatacgtatcttgcctttttctctcagaaactccagactttggctattggtcgagataagcccggaccatagtgagtctttcacactctacatttctcccttgctccaactatcgattgttgtctactaactatcgtacgataacttcgtatagcatacattatacgaagttatcgcgtcgacgagtatctgtctgactcgtcattgccgcctttggagtacgactccaactatgagtgtgcttggatcactttgacgatacattcttcgttggaggctgtgggtctgacagctgcgttttcggcgcggttggccgacaacaatatcagctgcaacgtcattgctggctttcatcatgatcacatttttgtcggcaaaggcgacgcccagagagccattgacgttctttctaatttggaccgatagccgtatagtccagtctatctataagttcaactaactcgtaactattaccataacatatacttcactgccccagataaggttccgataaaaagttctgcagactaaatttatttcagtctcctcttcaccaccaaaatgccctcctacgaagctcgagctaacgtccacaagtccgcctttgccgctcgagtgctcaagctcgtggcagccaagaaaaccaacctgtgtgcttctctggatgttaccaccaccaaggagctcattgagcttgccgataaggtcggaccttatgtgtgcatgatcaaaacccatatcgacatcattgacgacttcacctacgccggcactgtgctccccctcaaggaacttgctcttaagcacggtttcttcctgttcgaggacagaaagttcgcagatattggcaacactgtcaagcaccagtaccggtgtcaccgaatcgccgagtggtccgatatcaccaacgcccacggtgtacccggaaccggaatcattgctggcctgcgagctggtgccgaggaaactgtctctgaacagaagaaggaggacgtctctgactacgagaactcccagtacaaggagttcctagtcccctctcccaacgagaagctggccagaggtctgctcatgctggccgagctgtcttgcaagggctctctggccactggcgagtactccaagcagaccattgagcttgcccgatccgaccccgagtttgtggttggcttcattgcccagaaccgacctaagggcgactctgaggactggcttattctgacccccggggtgggtcttgacgacaagggagacgctctcggacagcagtaccgaactgttgaggatgtcatgtctaccggaacggatatcataattgtcggccgaggtctgtacggccagaaccgagatcctattgaggaggccaagcgataccagaaggctggctgggaggcttaccagaagattaactgttagaggttagactatggatatgtaatttaactgtgtatatagagagcgtgcaagtatggagcgcttgttcagcttgtatgatggtcagacgacctgtctgatcgagtatgtatgatactgcacaacctgtgtatccgcatgatctgtccaatggggcatgttgttgtgtttctcgatacggagatgctgggtacagtgctaatacgttgaactacttatacttatatgaggctcgaagaaagctgacttgtgtatgacttattctcaactacatccccagtcacaataccaccactgcactaccactacaccaaaaccatgatcaaaccacccatggacttcctggaggcagaagaacttgttatggaaaagctcaagagagagatcataacttcgtatagcatacattatacgaagttatcctgcaggtaaaggaattcatgctgttcatcgtggttaatgctgctgtgtgctgtgtgtgtgtgttgtttggcgctcattgttgcgttatgcagcgtacaccacaatattggaagcttattagcctttctattttttcgtttgcaaggcttaacaacattgctgtggagagggatggggatatggaggccgctggagggagtcggagaggcgttttggagcggcttggcctggcgcccagctcgcgaaacgcacctaggaccctttggcacgccgaaatgtgccacttttcagtctagtaacgccttacctacgtcattccatgcgtgcatgtttgcgccttttttcccttgcccttgatcgccacacagtacagtgcactgtacagtggaggttttgggggggtcttagatgggagctaaaagcggcctagcggtacactagtgggattgtatggagtggcatggagcctaggtggagcctgacaggacgcacgaccggctagcccgtgacagacgatgggtggctcctgttgtccaccgcgtacaaatgtttgggccaaagtcttgtcagccttgcttgcgaacctaattcccaattttgtcacttcgcacccccattgatcgagccctaacccctgcccatcaggcaatccaattaagctcgcattgtctgccttgtttagtttggctcctgcccgtttcggcgtccacttgcacaaacacaaacaagcattatatataaggctcgtctctccctcccaaccacactcacttttttgcccgtcttcccttgctaacacaaaagtcaagaacacaaacaaccaccccaacccccttacacacaagacatatctacagcaatggccatggcttcttccactgttgctgcgccgtacgagttcccgacgctgacggagatcaagcgctcgctgccagcgcactgctttgaggcctcggtcccgtggtcgctctactacaccgtgcgcgcgctgggcatcgccggctcgctcgcgctcggcctctactacgcgcgcgcgctcgcgatcgtgcaggagtttgccctgctggatgcggtgctctgcacggggtacattctgctgcagggcatcgtattctgggggttcttcaccatcggccatgactgcggccacggcgcgttctcgcgttcgcacctgctcaacttcagcgtcggcacgctcattcactcgatcatcctcacgccgtacgagtcatggaagatctcgcaccgccaccaccacaagaacacgggcaacatcgacaaggacgagattttctacccgcagcgcgaggccgactcgcacccactgtcccgacacatggtgatctcgctcggctcggcctggttcgcgtacctcgttgcgggcttccctcctcgcaaggtgaaccacttcaacccttgggaaccgttgtacctgcgccgcatgtctgccgtcatcatctcactcggctcgctcgtggcgttcgcgggcttgtatgcgtatctcacctacgtctatggccttaagaccatggcgctgtactacttcgcccctctctttgggttcgccacgatgctcgtggtcactacctttttgcaccacaatgacgaggaaacgccatggtacgccgactcggagtggacgtacgtcaagggcaacctctcgtccgtggaccgctcgtacggcgcgctcatcgacaacctgagccacaacatcggcacgcaccagatccaccacctgtttccgatcatcccgcactacaagctgaacgaggcgacggcagcgttcgcgcaggcgttcccggagctcgtgcgcaagagcgcgtcgccgatcatcccgacgttcatccgcatcgggctcatgtacgccaagtacggcgtcgtggacaaggacgccaagatgtttacgctcaaggaggccaaggccgccaagaccaaggccaactaggcggccgcattgatgattggaaacacacacatgggttatatctaggtgagagttagttggacagttatatattaaatcagctatgccaacggtaacttcattcatgtcaacgaggaaccagtgactgcaagtaatatagaatttgaccaccttgccattctcttgcactcctttactatatctcatttatttcttatatacaaatcacttcttcttcccagcatcgagctcggaaacctcatgagcaataacatcgtggatctcgtcaatagagggctttttggactccttgctgttggccaccttgtccttgctgtttaaacagtgtacgcagatctactatagaggaacatttaaattgccccggagaagacggccaggccgcctagatgacaaattcaacaactcacagctgactttctgccattgccactaggggggggcctttttatatggccaagccaagctctccacgtcggttgggctgcacccaacaataaatgggtagggttgcaccaacaaagggatgggatggggggtagaagatacgaggataacggggctcaatggcacaaataagaacgaatactgccattaagactcgtgatccagcgactgacaccattgcatcatctaagggcctcaaaactacctcggaactgctgcgctgatctggacaccacagaggttccgagcactttaggttgcaccaaatgtcccaccaggtgcaggcagaaaacgctggaacagcgtgtacagtttgtcttaacaaaaagtgagggcgctgaggtcgagcagggtggtgtgacttgttatagcctttagagctgcgaaagcgcgtatggatttggctcatcaggccagattgagggtctgtggacacatgtcatgttagtgtacttcaatcgccccctggatatagccccgacaataggccgtggcctcatttttttgccttccgcacatttccattgctcggtacccacaccttgcttctcctgcacttgccaaccttaatactggtttacattgaccaacatcttacaagcggggggcttgtctagggtatatataaacagtggctctcccaatcggttgccagtctcttttttcctttctttccccacagattcgaaatctaaactacacatcacagaattccgagccgtgagtatccacgacaagatcagtgtcgagacgacgcgttttgtgtaatgacacaatccgaaagtcgctagcaacacacactctctacacaaactaacccagctctggtaccatggcttcttccactgttgctgcgccgtacgagttcccgacgctgacggagatcaagcgctcgctgccagcgcactgctttgaggcctcggtcccgtggtcgctctactacaccgtgcgcgcgctgggcatcgccggctcgctcgcgctcggcctctactacgcgcgcgcgctcgcgatcgtgcaggagtttgccctgctggatgcggtgctctgcacggggtacattctgctgcagggcatcgtattctgggggttcttcaccatcggccatgactgcggccacggcgcgttctcgcgttcgcacctgctcaacttcagcgtcggcacgctcattcactcgatcatcctcacgccgtacgagtcatggaagatctcgcaccgccaccaccacaagaacacgggcaacatcgacaaggacgagattttctacccgcagcgcgaggccgactcgcacccactgtcccgacacatggtgatctcgctcggctcggcctggttcgcgtacctcgttgcgggcttccctcctcgcaaggtgaaccacttcaacccttgggaaccgttgtacctgcgccgcatgtctgccgtcatcatctcactcggctcgctcgtggcgttcgcgggcttgtatgcgtatctcacctacgtctatggccttaagaccatggcgctgtactacttcgcccctctctttgggttcgccacgatgctcgtggtcactacctttttgcaccacaatgacgaggaaacgccatggtacgccgactcggagtggacgtacgtcaagggcaacctctcgtccgtggaccgctcgtacggcgcgctcatcgacaacctgagccacaacatcggcacgcaccagatccaccacctgtttccgatcatcccgcactacaagctgaacgaggcgacggcagcgttcgcgcaggcgttcccggagctcgtgcgcaagagcgcgtcgccgatcatcccgacgttcatccgcatcgggctcatgtacgccaagtacggcgtcgtggacaaggacgccaagatgtttacgctcaaggaggccaaggccgccaagaccaaggccaactaggcggccgcatggagcgtgtgttctgagtcgatgttttctatggagttgtgagtgttagtagacatgatgggtttatatatgatgaatgaatagatgtgattttgatttgcacgatggaattgagaactttgtaaacgtacatgggaatgtatgaatgtgggggttttgtgactggataactgacggtcagtggacgccgttgttcaaatatccaagagatgcgagaaactttgggtcaagtgaacatgtcctctctgttcaagtaaaccatcaactatgggtagtatatttagtaaggacaagagttgagattctttggagtcctagaaacgtattttcgcgttccaagatcaaattagtagagtaatacgggcacgggaatccattcatagtctcaatcctgcaggtgagttaattaagatgacgacatttgcgagctggacgaggaatagatggagcgtgtgttctgagtcgatgttttctatggagttgtgagtgttagtagacatgatgggtttatatatgatgaatgaatagatgtgattttgatttgcacgatggaattgagaactttgtaaacgtacatgggaatgtatgaatgtgggggttttgtgactggataactgacggtcagtggacgccgttgttcaaatatccaagagatgcgagaaactttgggtcaagtgaacatgtcctctctgttcaagtaaaccatcaactatgggtagtatatttagtaaggacaagagttgagattctttggagtcctagaaacgtattttcgcgttccaagatcaaattagtagagtaatacgggcacgggaatccattcatagtctcaattttcccataggtgtgctacaaggtgttgagatgtggtacagtaccaccatgattcgaggtaaagagcccagaagtcattgatgaggtcaagaaatacacagatctacagctcaatacaatgaatatcttctttcatattcttcaggtgacaccaagggtgtctattttccccagaaatgcgtgaaaaggcgcgtgtgtagcgtggagtatgggttcggttggcgtatccttcatatatcgacgaaatagtagggcaagagatgacaaaaagtatctatatgtagacagcgtagaatatggatttgattggtataaattcatttattgcgtgtctcacaaatactctcgataagttggggttaaactggagatggaacaatgtcgatatctcgacgcatgcgacgtcgggcccaattcgccctatagtgagtcgtattacaattcactggccgtcgttttacaacgtcgtgactgggaaaaccctggcgttacccaacttaatcgccttgcagcacatccccctttcgccagctggcgtaatagcgaagaggcccgcaccgatcgcccttcccaacagttgcgcagcctgaatggcgaatggacgcgccctgtagcggcgcattaagcgcggcgggtgtggtggttacgcgcagcgtgaccgctacacttgccagcgccctagcgcccgctcctttcgctttcttcccttcctttctcgccacgttcgccggctttccccgtcaagctctaaatcgggggctccctttagggttccgatttagtgctttacggcacctcgaccccaaaaaacttgattagggtgatggttcacgtagtgggccatcgccctgatagacggtttttcgccctttgacgttggagtccacgttctttaatagtggactcttgttccaaactggaacaacactcaacccta

SEQ ID NO: 219 - DNA, 1080 bp, Pythium aphanidermatum
  CDS (1)..(1080): synthetic delta-17 desaturase (codon-optimized for Yarrowia lipolytica)
atggcttcctctaccgttgccgctccctacgagttccctactctcaccgagatcaagcgatccctgcctgcccactgcttcgaagcctctgttccctggtccctctactataccgtgcgagctctgggcattgccggttcccttgctctcggactgtactatgctcgagcccttgctatcgtgcaggagtttgcactgctcgatgccgtcctttgcactggctacattctgctccagggtatcgtgttctggggattctttaccatcggtcacgactgtggacatggtgccttctcgcgatcccacctgctcaacttctctgttggcacactcattcactccatcattctgactccctacgagtcgtggaagatcagccatcgacaccatcacaagaacaccggcaacatcgacaaggatgagatcttctaccctcagcgagaagccgactctcatcccctgtcccgacacatggtcatctcccttggttcggcttggtttgcctacctcgttgctggatttcctccccgaaaggtcaaccacttcaatccctgggagcctctctacctgcgaagaatgtctgccgtcatcatttccctcggctctctcgtggcctttgctggtctgtacgcctaccttacctacgtctacggcctcaagaccatggctctgtattacttcgcacctctctttggattcgccaccatgctggttgtcactaccttcctccatcacaacgacgaggaaactccctggtacgccgattcggagtggacctatgtcaagggcaacttgtcctctgtggaccgaagctacggagccctcatcgacaacctgtcccacaacattggtacacatcagatccaccatctgtttcccatcattcctcactacaagctcaacgaggccactgctgccttcgctcaggcctttcccgaactggtgcgaaagtcggcttctcccatcattcccaccttcatccgaattggtcttatgtacgccaagtacggcgtggtcgacaaggatgccaagatgtttaccctcaaggaggccaaggctgccaagaccaaagccaactaa

SEQ ID NO: 220 - protein, 359 aa, Pythium aphanidermatum
MASSTVAAPYEFPTLTEIKRSLPAHCFEASVPWSLYYTVRALGIAGSLALGLYYARALAIVQEFALLDAVLCTGYILLQGIVFWGFFTIGHDCGHGAFSRSHLLNFSVGTLIHSIILTPYESWKISHRHHHKNTGNIDKDEIFYPQREADSHPLSRHMVISLGSAWFAYLVAGFPPRKVNHFNPWEPLYLRRMSAVIISLGSLVAFAGLYAYLTYVYGLKTMALYYFAPLFGFATMLVVTTFLHHNDEETPWYADSEWTYVKGNLSSVDRSYGALIDNLSHNIGTHQIHHLFPIIPHYKLNEATAAFAQAFPELVRKSASPIIPTFIRIGLMYAKYGVVDKDAKMFTLKEAKAAKTKAN

SEQ ID NO: 221 - DNA, 1080 bp, Pythium aphanidermatum
  CDS (1)..(1080): delta-17 desaturase
atggcttcttccactgttgctgcgccgtacgagttcccgacgctgacggagatcaagcgctcgctgccagcgcactgctttgaggcctcggtcccgtggtcgctctactacaccgtgcgcgcgctgggcatcgccggctcgctcgcgctcggcctctactacgcgcgcgcgctcgcgatcgtgcaggagtttgccctgctggatgcggtgctctgcacggggtacattctgctgcagggcatcgtattctgggggttcttcaccatcggccatgactgcggccacggcgcgttctcgcgttcgcacctgctcaacttcagcgtcggcacgctcattcactcgatcatcctcacgccgtacgagtcatggaagatctcgcaccgccaccaccacaagaacacgggcaacatcgacaaggacgagattttctacccgcagcgcgaggccgactcgcacccactgtcccgacacatggtgatctcgctcggctcggcctggttcgcgtacctcgttgcgggcttccctcctcgcaaggtgaaccacttcaacccttgggaaccgttgtacctgcgccgcatgtctgccgtcatcatctcactcggctcgctcgtggcgttcgcgggcttgtatgcgtatctcacctacgtctatggccttaagaccatggcgctgtactacttcgcccctctctttgggttcgccacgatgctcgtggtcactacctttttgcaccacaatgacgaggaaacgccatggtacgccgactcggagtggacgtacgtcaagggcaacctctcgtccgtggaccgctcgtacggcgcgctcatcgacaacctgagccacaacatcggcacgcaccagatccaccacctgtttccgatcatcccgcactacaagctgaacgaggcgacggcagcgttcgcgcaggcgttcccggagctcgtgcgcaagagcgcgtcgccgatcatcccgacgttcatccgcatcgggctcatgtacgccaagtacggcgtcgtggacaaggacgccaagatgtttacgctcaaggaggccaaggccgccaagaccaaggccaactag

SEQ ID NO: 222 - protein, 359 aa, Pythium aphanidermatum; identical to SEQ ID NO: 220

SEQ ID NO: 223 - DNA, 9570 bp, Artificial Sequence
  Plasmid pY117
ggccgccaccgcggcccgagattccggcctcttcggccgccaagcgacccgggtggacgtctagaggtacctagcaattaacagatagtttgccggtgataattctcttaacctcccacactcctttgacataacgatttatgtaacgaaactgaaatttgaccagatattgtgtccgcggtggagctccagcttttgttccctttagtgagggtttaaacgagcttggcgtaatcatggtcatagctgtttcctgtgtgaaattgttatccgctcacaattccacacaacgtacgagccggaagcataaagtgtaaagcctggggtgcctaatgagtgagctaactcacattaattgcgttgcgctcactgcccgctttccagtcgggaaacctgtcgtgccagctgcattaatgaatcggccaacgcgcggggagaggcggtttgcgtattgggcgctcttccgcttcctcgctcactgactcgctgcgctcggtcgttcggctgcggcgagcggtatcagctcactcaaaggcggtaatacggttatccacagaatcaggggataacgcaggaaagaacatgtgagcaaaaggccagcaaaaggccaggaaccgtaaaaaggccgcgttgctggcgtttttccataggctccgcccccctgacgagcatcacaaaaatcgacgctcaagtcagaggtggcgaaacccgacaggactataaagataccaggcgtttccccctggaagctccctcgtgcgctctcctgttccgaccctgccgcttaccggatacctgtccgcctttctcccttcgggaagcgtggcgctttctcatagctcacgctgtaggtatctcagttcggtgtaggtcgttcgctccaagctgggctgtgtgcacgaaccccccgttcagcccgaccgctgcgccttatccggtaactatcgtcttgagtccaacccggtaagacacgacttatcgccactggcagcagccactggtaacaggattagcagagcgaggtatgtaggcggtgctacagagttcttgaagtggtggcctaactacggctacactagaaggacagtatttggtatctgcgctctgctgaagccagttaccttcggaaaaagagttggtagctcttgatccggcaaacaaaccaccgctggtagcggtggtttttttgtttgcaagcagcagattacgcgcagaaaaaaaggatctcaagaagatcctttgatcttttctacggggtctgacgctcagtggaacgaaaactcacgttaagggattttggtcatgagattatcaaaaaggatcttcacctagatccttttaaattaaaaatgaagttttaaatcaatctaaagtatatatgagtaaacttggtctgacagttaccaatgcttaatcagtgaggcacctatctcagcgatctgtctatttcgttcatccatagttgcctgactccccgtcgtgtagataactacgatacgggagggcttaccatctggccccagtgctgcaatgataccgcgagacccacgctcaccggctccagatttatcagcaataaaccagccagccggaagggccgagcgcagaagtggtcctgcaactttatccgcctccatccagtctattaattgttgccgggaagctagagtaagtagttcgccagttaatagtttgcgcaacgttgttgccattgctacaggcatcgtggtgtcacgctcgtcgtttggtatggcttcattcagctccggttcccaacgatcaaggcgagttacatgatcccccatgttgtgcaaaaaagcggttagctccttcggtcctccgatcgttgtcagaagtaagttggccgcagtgttatcactcatggttatggcagcactgcataattctcttactgtcatgccatccgtaagatgcttttctgtgactggtgagtactcaaccaagtcattctgagaatagtgtatgcggcgaccgagttgctcttgcccggcgtcaatacgggataataccgcgccacatagcagaactttaaaagtgctcatcattggaaaacgttcttcggggcgaaaactctcaaggatcttaccgctgttgagatccagttcgatgtaacccactcgtgcacccaactgatcttcagcatcttttactttcaccagcgtttctgggtgagcaaaaacaggaaggcaaaatgccgcaaaaaagggaataagggcgacacggaaatgttgaatactcatactcttcctttttcaatattattgaagcatttatcagggttattgtctcatgagcggatacatatttgaatgtatttagaaaaataaacaaataggggttccgcgcacatttccccgaaaagtgccacctgacgcgccctgtagcggcgcattaagcgcggcgggtgtggtggttacgcgcagcgtgaccgctacacttgccagcgccctagcgcccgctcctttcgctttcttcccttcctttctcgccacgttcgccggctttccccgtcaagctctaaatcgggggctccctttagggttccgatttagtgctttacggcacctcgaccccaaaaaacttgattagggtgatggttcacgtagtgggccatcgccctgatagacggtttttcgccctttgacgttggagtccacgttctttaatagtggactcttgttccaaactggaacaacactcaaccctatctcggtctattcttttgatttataagggattttgccgatttcggcctattggttaaaaaatgagctgatttaacaaaaatttaacgcgaattttaacaaaatattaacgcttacaatttccattcgccattcaggctgcgcaactgttgggaagggcgatcggtgcgggcctcttcgctattacgccagctggcgaaagggggatgtgctgcaaggcgattaagttgggtaacgccagggttttcccagtcacgacgttgtaaaacgacggccagtgaattgtaatacgactcactatagggcgaattgggtaccgggccccccctcgaggtcgatggtgtcgataagcttgatatcgaattcatgtcacacaaaccgatcttcgcctcaaggaaacctaattctacatccgagagactgccgagatccagtctacactgattaattttcgggccaataatttaaaaaaatcgtgttatataatattatatgtattatatatatacatcatgatgatactgacagtcatgtcccattgctaaatagacagactccatctgccgcctccaactgatgttctcaatatttaaggggtcatctcgcattgtttaataataaacagactccatctaccgcctccaaatgatgttctcaaaatatattgtatgaacttatttttattacttagtattattagacaacttacttgctttatgaaaaacacttcctatttaggaaacaatttataatggcagttcgttcatttaacaatttatgtagaataaatgttataaatgcgtatgggaaatcttaaatatggatagcataaatgatatctgcattgcctaattcgaaatcaacagcaacgaaaaaaatcccttgtacaacataaatagtcatcgagaaatatcaactatcaaagaacagctattcacacgttactattgagattattattggacgagaatcacacactcaactgtctttctctcttctagaaatacaggtacaagtatgtactattctcattgttcatacttctagtcatttcatcccacatattccttggatttctctccaatgaatgacattctatcttgcaaattcaacaattataataagatataccaaagtagcggtatagtggcaatcaaaaagcttctctggtgtgcttctcgtatttatttttattctaatgatccattaaaggtatatatttatttcttgttatataatccttttgtttattacatgggctggatacataaaggtattttgatttaattttttgcttaaattcaatcccccctcgttcagtgtcaactgtaatggtaggaaattaccatacttttgaagaagcaaaaaaaatgaaagaaaaaaaaaatcgtatttccaggttagacgttccgcagaatctagaatgcggtatgcggtacattgttcttcgaacgtaaaagttgcgctccctgagatattgtacatttttgcttttacaagtacaagtacatcgtacaactatgtactactgttgatgcatccacaacagtttgttttgtttttttttgttttttttttttctaatgattcattaccgctatgtatacctacttgtacttgtagtaagccgggttattggcgttcaattaatcatagacttatgaatctgcacggtgtgcgctgcgagttacttttagcttatgcatgctacttgggtgtaatattgggatctgttcggaaatcaacggatgctcaaccgatttcgacagtaattaattaattccctagtcccagtgtacacccgccgatatcgcttaccctgcagccggattaaggttggcaatttttcacgtccttgtctccgcaattactcaccgggtggtttataagattgcaagcgtcttgatttgtctctgtatactaacatgcaatcgcgactcgcccgacgggccactaacctggccagaatctccagatccaagtattctcttggtctgcgatatgtttccaacacaaaagcccctgctgcccagccggcaactgctgagtgagtattccttgccataaacgacccagaaccactgtatagtgtttggaagcactagtcagaagaccagcgaaaacaggtggaaaaaactgagacgaaaagcaacgaccagaaatgtaatgtgtggaaaagcgacacacacagagcagataaagaggtgacaaataacgacaaatgaaatatcagtatcttcccacaatcactacctctcagctgtctgaaggtgcggctgatatatccatcccacgtctaacgtatggagtgtgatagaatatgacgacacaagcatgagaactcgctctctatccaaccaccgaaacactgtcactacagccgttcttgttgctccattcgcttttgtgattccatgccttctctggtgactgacaacattccttccttttctccagccctgttgttatctgctcatgacctacggccactctctatcgcatactaacatagacgatcccagcccgctccccacttccagggcaccgttggcaagcctcctatcctcaagaaggctgaggctgccaacgctgacatggacgagtccttcatcggaatgtctggaggagagatcttccacgagatgatgctgcgacacaacgtcgacactgtcttcggttaccccggtggagccattctccccgtctttgacgccattcacaactctgagtacttcaactttgtgctccctcgacacgagcagggtgccggccacatggccgagggctacgctcgagcctctggtaagcccggtgtcgttctcgtcacctctggccccggtgccaccaacgtcatcacccccatgcaggacgctctttccgatggtacccccatggttgtcttcaccggtcaggtcctgacctccgttatcggcactgacgccttccaggaggccgatgttgtcggcatctcccgatcttgcaccaagtggaacgtcatggtcaagaacgttgctgagctcccccgacgaatcaacgaggcctttgagattgctacttccggccgacccggtcccgttctcgtcgatctgcccaaggatgttactgctgccatcctgcgagagcccatccccaccaagtccaccattccctcgcattctctgaccaacctcacctctgccgccgccaccgagttccagaagcaggctatccagcgagccgccaacctcatcaaccagtccaagaagcccgtcctttacgtcggacagggtatccttggctccgaggagggtcctaagctgcttaaggagctggctgagaaggccgagattcccgtcaccactactctgcagggtcttggtgcctttgacgagcgagaccccaagtctctgcacatgctcggtatgcacggttccggctacgccaacatggccatgcagaacgctgactgtatcattgctctcggcgcccgatttgatgaccgagttaccggctccatccccaagtttgcccccgaggctcgagccgctgcccttgagggtcgaggtggtattgttcactttgagatccaggccaagaacatcaacaaggttgttcaggccaccgaagccgttgagggagacgttaccgagtctgtccgacagctcatccccctcatcaacaaggtctctgccgctgagcgagctccctggactgagactatccagtcctggaagcagcagttccccttcctcttcgaggctgaaggtgaggatggtgttatcaagccccagtccgtcattgctctgctctctgacctgacagagaacaacaaggacaagaccatcatcaccaccggtgttggtcagcatcagatgtggactgcccagcatttccgatggcgacaccctcgaaccatgatcacttctggtggtcttggaactatgggttacggcctgcccgccgctatcggcgccaaggttgcccgacctgactgcgacgtcattgacatcgatggtgacgcttctttcaacatgactctgaccgagctgtccaccgccgttcagttcaacattggcgtcaaggctattgtcctcaacaacgaggaacagggtatggtcacccagctgcagtctctcttctacgagaaccgatactgccacactcatcagaagaaccccgacttcatgaagctggccgagtccatgggcatgaagggtatccgaatcactcacattgaccagctggaggccggtctcaaggagatgctcgcatacaagggccctgtgctcgttgaggttgttgtcgacaagaagatccccgttcttcccatggttcccgctggtaaggctttgcatgagttccttgtctacgacgctgacgccgaggctgcttctcgacccgatcgactgaagaatgcccccgcccctcacgtccaccagaccacctttgagaactaagtggaaaggaacacaagcaatccgaaccaaaaataattggggtcccgtgcccacagagtctagtgcagacctaaaatgaccacagtaaattatagctgttattaaacatgagattttgaccaacaagagcgtaggaatgttattagctactacttgtacatacacagcatttgttttaaataatgttgcctccaggggcagtgagatcaggacccagatccgtggccagctctctgacttcagaccgcttgtacttaagcagctcgcaacactgttgtcgaggattgaacttgccatattcgattttgtggtcatgaatccagcacacctcatttaaatgtagctaacggtagcaggcgaactactggtacatacctcccccggaatatgtacaggcataatgcgtatctgtgggacatgtggtcgttgcgccattatgtaagcagcgtgtactcctctgactgtccatatggtttgctccatctcaccctcatcgttttcattgttcacaggcggccacaaaaaaactgtcttctctccttctctcttcgccttagtctactcggaccagttttagtttagcttggcgccactggataaatgagacctcaggccttgtgatgaggaggtcacttatgaagcatgttaggaggtgcttgtatggatagagaagcacccaaaataataagaataataataaaacagggggcgttgtcatttcatatcgtgttttcaccatcaatacacctccaaacaatgcccttcatgtggccagccccaatattgtcctgtagttcaactctatgcagctcgtatcttattgagcaagtaaaactctgtcagccgatattgcccgacccgcgacaagggtcaacaaggtggtgtaaggccttcgcagaagtcaaaactgtgccaaacaaacatctagagtctctttggtgtttctcgcatatatttwatcggctgtcttacgtatttgcgcctcggtaccggactaatttcggatcatccccaatacgctttttcttcgcagctgtcaacagtgtccatgatctatccacctaaatgggtcatatgaggcgtataatttcgtggtgctgataataattcccatatatttgacacaaaacttccccccctagacatacatctcacaatctcacttcttgtgcttctgtcacacatctcctccagctgacttcaactcacacctctgccccagttggtctacagcggtataaggtttctccgcatagaggtgcaccactcctcccgatacttgtttgtgtgacttgtgggtcacgacatatatatctacacacattgcgccaccctttggttcttccagcacaacaaaaacacgacacgctaaccatggccaatttactgaccgtacaccaaaatttgcctgcattaccggtcgatgcaacgagtgatgaggttcgcaagaacctgatggacatgttcagggatcgccaggcgttttctgagcatacctggaaaatgcttctgtccgtttgccggtcgtgggcggcatggtgcaagttgaataaccggaaatggtttcccgcagaacctgaagatgttcgcgattatcttctatatcttcaggcgcgcggtctggcagtaaaaactatccagcaacatttgggccagctaaacatgcttcatcgtcggtccgggctgccacgaccaagtgacagcaatgctgtttcactggttatgcggcggatccgaaaagaaaacgttgatgccggtgaacgtgcaaaacaggctctagcgttcgaacgcactgatttcgaccaggttcgttcactcatggaaaatagcgatcgctgccaggatatacgtaatctggcatttctggggattgcttataacaccctgttacgtatagccgaaattgccaggatcagggttaaagatatctcacgtactgacggtgggagaatgttaatccatattggcagaacgaaaacgctggttagcaccgcaggtgtagagaaggcacttagcctgggggtaactaaactggtcgagcgatggatttccgtctctggtgtagctgatgatccgaataactacctgttttgccgggtcagaaaaaatggtgttgccgcgccatctgccaccagccagctatcaactcgcgccctggaagggatttttgaagcaactcatcgattgatttacggcgctaaggatgactctggtcagagatacctggcctggtctggacacagtgcccgtgtcggagccgcgcgagatatggcccgcgctggagtttcaataccggagatcatgcaagctggtggctggaccaatgtaaatattgtcatgaactatatccgtaacctggatagtgaaacaggggcaatggtgcgcctgctggaagatggcgattaagc

SEQ ID NO: 224 - DNA, 2987 bp, Yarrowia lipolytica
  misc_feature: mutant acetohydroxyacid synthase (AHAS) with W497L mutation
  ref <302>: TITLE: HIGH EICOSAPENTAENOIC ACID PRODUCING STRAINS OF YARROWIA LIPOLYTICA
  ref <310>: PATENT DOCUMENT NUMBER: US 2006-0115881-A1
  ref <311>: PATENT FILING DATE: 2005-11-02
  ref <312>: PUBLICATION DATE: 2006-06-01
  ref <313>: RELEVANT RESIDUES IN SEQ ID NO: (1)..(2987)
  ref <302>: TITLE: HIGH EICOSAPENTAENOIC ACID PRODUCING STRAINS OF YARROWIA LIPOLYTICA
  ref <310>: PATENT DOCUMENT NUMBER: WO 2006/052870
  ref <311>: PATENT FILING DATE: 2005-11-03
  ref <312>: PUBLICATION DATE: 2006-05-18
  ref <313>: RELEVANT RESIDUES IN SEQ ID NO: (1)..(2987)
ttccctagtcccagtgtacacccgccgatatcgcttaccctgcagccggattaaggttggcaatttttcacgtccttgtctccgcaattactcaccgggtggtttataagattgcaagcgtcttgatttgtctctgtatactaacatgcaatcgcgactcgcccgacgggccactaacctggccagaatctccagatccaagtattctcttggtctgcgatatgtttccaacacaaaagcccctgctgcccagccggcaactgctgagtgagtattccttgccataaacgacccagaaccactgtatagtgtttggaagcactagtcagaagaccagcgaaaacaggtggaaaaaactgagacgaaaagcaacgaccagaaatgtaatgtgtggaaaagcgacacacacagagcagataaagaggtgacaaataacgacaaatgaaatatcagtatcttcccacaatcactacctctcagctgtctgaaggtgcggctgatatatccatcccacgtctaacgtatggagtgtgatagaatatgacgacacaagcatgagaactcgctctctatccaaccaccgaaacactgtcactacagccgttcttgttgctccattcgcttttgtgattccatgccttctctggtgactgacaacattccttccttttctccagccctgttgttatctgctcatgacctacggccactctctatcgcatactaacatagacgatcccagcccgctccccacttccagggcaccgttggcaagcctcctatcctcaagaaggctgaggctgccaacgctgacatggacgagtccttcatcggaatgtctggaggagagatcttccacgagatgatgctgcgacacaacgtcgacactgtcttcggttaccccggtggagccattctccccgtctttgacgccattcacaactctgagtacttcaactttgtgctccctcgacacgagcagggtgccggccacatggccgagggctacgctcgagcctctggtaagcccggtgtcgttctcgtcacctctggccccggtgccaccaacgtcatcacccccatgcaggacgctctttccgatggtacccccatggttgtcttcaccggtcaggtcctgacctccgttatcggcactgacgccttccaggaggccgatgttgtcggcatctcccgatcttgcaccaagtggaacgtcatggtcaagaacgttgctgagctcccccgacgaatcaacgaggcctttgagattgctacttccggccgacccggtcccgttctcgtcgatctgcccaaggatgttactgctgccatcctgcgagagcccatccccaccaagtccaccattccctcgcattctctgaccaacctcacctctgccgccgccaccgagttccagaagcaggctatccagcgagccgccaacctcatcaaccagtccaagaagcccgtcctttacgtcggacagggtatccttggctccgaggagggtcctaagctgcttaaggagctggctgagaaggccgagattcccgtcaccactactctgcagggtcttggtgcctttgacgagcgagaccccaagtctctgcacatgctcggtatgcacggttccggctacgccaacatggccatgcagaacgctgactgtatcattgctctcggcgcccgatttgatgaccgagttaccggctccatccccaagtttgcccccgaggctcgagccgctgcccttgagggtcgaggtggtattgttcactttgagatccaggccaagaacatcaacaaggttgttcaggccaccgaagccgttgagggagacgttaccgagtctgtccgacagctcatccccctcatcaacaaggtctctgccgctgagcgagctccctggactgagactatccagtcctggaagcagcagttccccttcctcttcgaggctgaaggtgaggatggtgttatcaagccccagtccgtcattgctctgctctctgacctgacagagaacaacaaggacaagaccatcatcaccaccggtgttggtcagcatcagatgtggactgcccagcatttccgatggcgacaccctcgaaccatgatcacttctggtggtcttggaactatgggttacggcctgcccgccgctatcggcgccaaggttgcccgacctgactgcgacgtcattgacatcgatggtgacgcttctttcaacatgactctgaccgagctgtccaccgccgttcagttcaacattggcgtcaaggctattgtcctcaacaacgaggaacagggtatggtcacccagctgcagtctctcttctacgagaaccgatactgccacactcatcagaagaaccccgacttcatgaagctggccgagtccatgggcatgaagggtatccgaatcactcacattgaccagctggaggccggtctcaaggagatgctcgcatacaagggccctgtgctcgttgaggttgttgtcgacaagaagatccccgttcttcccatggttcccgctggtaaggctttgcatgagttccttgtctacgacgctgacgccgaggctgcttctcgacccgatcgactgaagaatgcccccgcccctcacgtccaccagaccacctttgagaactaagtggaaaggaacacaagcaatccgaaccaaaaataattggggtcccgtgcccacagagtctagtgcagacctaaaatgaccacagtaaattatagctgttattaaacatgagattttgaccaacaagagcgtaggaatgttattagctactacttgtacatacacagcatttgttttaaataatgttgcctccaggggcagtgagatcaggacccagatccgtggccagctctctgacttcagaccgcttgtacttaagcagctcgcaacactgttgtcgaggattgaacttgccatattcgattttgtggtcatgaatccagcacacctc

SEQ ID NO: 225 - DNA, 15743 bp, Artificial Sequence
  Plasmid pZP2-2988
ggccgcatgtacatacaagattatttatagaaatgaatcgcgatcgaacaaagagtacgagtgtacgagtaggggatgatgataaaagtggaagaagttccgcatctttggatttatcaacgtgtaggacgatacttcctgtaaaaatgcaatgtctttaccataggttctgctgtagatgttattaactaccattaacatgtctacttgtacagttgcagaccagttggagtatagaatggtacacttaccaaaaagtgttgatggttgtaactacgatatataaaactgttgacgggatctgtatattcggtaagatatattttgtggggttttagtggtgtttaaacagtgtacgcagtactatagaggaacaattgccccggagaagacggccaggccgcctagatgacaaattcaacaactcacagctgactttctgccattgccactaggggggggcctttttatatggccaagccaagctctccacgtcggttgggctgcacccaacaataaatgggtagggttgcaccaacaaagggatgggatggggggtagaagatacgaggataacggggctcaatggcacaaataagaacgaatactgccattaagactcgtgatccagcgactgacaccattgcatcatctaagggcctcaaaactacctcggaactgctgcgctgatctggacaccacagaggttccgagcactttaggttgcaccaaatgtcccaccaggtgcaggcagaaaacgctggaacagcgtgtacagtttgtcttaacaaaaagtgagggcgctgaggtcgagcagggtggtgtgacttgttatagcctttagagctgcgaaagcgcgtatggatttggctcatcaggccagattgagggtctgtggacacatgtcatgttagtgtacttcaatcgccccctggatatagccccgacaataggccgtggcctcatttttttgccttccgcacatttccattgctcggtacccacaccttgcttctcctgcacttgccaaccttaatactggtttacattgaccaacatcttacaagcggggggcttgtctagggtatatataaacagtggctctcccaatcggttgccagtctcttttttcctttctttccccacagattcgaaatctaaactacacatcacaccatggaggtcgtgaacgaaatcgtctccattggccaggaggttcttcccaaggtcgactatgctcagctctggtctgatgcctcgcactgcgaggtgctgtacctctccatcgccttcgtcatcctgaagttcacccttggtcctctcggacccaagggtcagtctcgaatgaagtttgtgttcaccaactacaacctgctcatgtccatctactcgctgggctccttcctctctatggcctacgccatgtacaccattggtgtcatgtccgacaactgcgagaaggctttcgacaacaatgtcttccgaatcaccactcagctgttctacctcagcaagttcctcgagtacattgactccttctatctgcccctcatgggcaagcctctgacctggttgcagttctttcaccatctcggagctcctatggacatgtggctgttctacaactaccgaaacgaagccgtttggatctttgtgctgctcaacggcttcattcactggatcatgtacggctactattggacccgactgatcaagctcaagttccctatgcccaagtccctgattacttctatgcagatcattcagttcaacgttggcttctacatcgtctggaagtaccggaacattccctgctaccgacaagatggaatgagaatgtttggctggtttttcaactacttctacgttggtactgtcctgtgtctgttcctcaacttctacgtgcagacctacatcgtccgaaagcacaagggagccaaaaagattcagtgagcggccgcaagtgtggatggggaagtgagtgcccggttctgtgtgcacaattggcaatccaagatggatggattcaacacagggatatagcgagctacgtggtggtgcgaggatatagcaacggatatttatgtttgacacttgagaatgtacgatacaagcactgtccaagtacaatactaaacatactgtacatactcatactcgtacccgggcaacggtttcacttgagtgcagtggctagtgctcttactcgtacagtgtgcaatactgcgtatcatagtctttgatgtatatcgtattcattcatgttagttgcgtacgggcgtcgttgcttgtgtgatttttgaggacccatccctttggtatataagtatactctggggttaaggttgcccgtgtagtctaggttatagttttcatgtgaaataccgagagccgagggagaataaacgggggtatttggacttgtttttttcgcggaaaagcgtcgaatcaaccctgcgggccttgcaccatgtccacgacgtgtttctcgccccaattcgccccttgcacgtcaaaattaggcctccatctagacccctccataacatgtgactgtggggaaaagtataagggaaaccatgcaaccatagacgacgtgaaagacggggaggaaccaatggaggccaaagaaatggggtagcaacagtccaggagacagacaaggagacaaggagagggcgcccgaaagatcggaaaaacaaacatgtccaattggggcagtgacggaaacgacacggacacttcagtacaatggaccgaccatctccaagccagggttattccggtatcaccttggccgtaacctcccgctggtacctgatattgtacacgttcacattcaatatactttcagctacaataagagaggctgtttgtcgggcatgtgtgtccgtcgtatggggtgatgtccgagggcgaaattcgctacaagcttaactctggcgcttgtccagtatgaatagacaagtcaagaccagtggtgccatgattgacagggaggtacaagacttcgatactcgagcattactcggacttgtggcgattgaacagacgggcgatcgcttctcccccgtattgccggcgcgccagctgcattaatgaatcggccaacgcgcggggagaggcggtttgcgtattgggcgctcttccgcttcctcgctcactgactcgctgcgctcggtcgttcggctgcggcgagcggtatcagctcactcaaaggcggtaatacggttatccacagaatcaggggataacgcaggaaagaacatgtgagcaaaaggccagcaaaaggccaggaaccgtaaaaaggccgcgttgctggcgtttttccataggctccgcccccctgacgagcatcacaaaaatcgacgctcaagtcagaggtggcgaaacccgacaggactataaagataccaggcgtttccccctggaagctccctcgtgcgctctcctgttccgaccctgccgcttaccggatacctgtccgcctttctcccttcgggaagcgtggcgctttctcatagctcacgctgtaggtatctcagttcggtgtaggtcgttcgctccaagctgggctgtgtgcacgaaccccccgttcagcccgaccgctgcgccttatccggtaactatcgtcttgagtccaacccggtaagacacgacttatcgccactggcagcagccactggtaacaggattagcagagcgaggtatgtaggcggtgctacagagttcttgaagtggtggcctaactacggctacactagaagaacagtatttggtatctgcgctctgctgaagccagttaccttcggaaaaagagttggtagctcttgatccggcaaacaaaccaccgctggtagcggtggtttttttgtttgcaagcagcagattacgcgcagaaaaaaaggatctcaagaagatcctttgatcttttctacggggtctgacgctcagtggaacgaaaactcacgttaagggattttggtcatgagattatcaaaaaggatcttcacctagatccttttaaattaaaaatgaagttttaaatcaatctaaagtatatatgagtaaacttggtctgacagttaccaatgcttaatcagtgaggcacctatctcagcgatctgtctatttcgttcatccatagttgcctgactccccgtcgtgtagataactacgatacgggagggcttaccatctggccccagtgctgcaatgataccgcgagacccacgctcaccggctccagatttatcagcaataaaccagccagccggaagggccgagcgcagaagtggtcctgcaactttatccgcctccatccagtctattaattgttgccgggaagctagagtaagtagttcgccagttaatagtttgcgcaacgttgttgccattgctacaggcatcgtggtgtcacgctcgtcgtttggtatggcttcattcagctccggttcccaacgatcaaggcgagttacatgatcccccatgttgtgcaaaaaagcggttagctccttcggtcctccgatcgttgtcagaagtaagttggccgcagtgttatcactcatggttatggcagcactgcataattctcttactgtcatgccatccgtaagatgcttttctgtgactggtgagtactcaaccaagtcattctgagaatagtgtatgcggcgaccgagttgctcttgcccggcgtcaatacgggataataccgcgccacatagcagaactttaaaagtgctcatcattggaaaacgttcttcggggcgaaaactctcaaggatcttaccgctgttgagatccagttcgatgtaacccactcgtgcacccaactgatcttcagcatcttttactttcaccagcgtttctgggtgagcaaaaacaggaaggcaaaatgccgcaaaaaagggaataagggcgacacggaaatgttgaatactcatactcttcctttttcaatattattgaagcatttatcagggttattgtctcatgagcggatacatatttgaatgtatttagaaaaataaacaaataggggttccgcgcacatttccccgaaaagtgccacctgatgcggtgtgaaataccgcacagatgcgtaaggagaaaataccgcatcaggaaattgtaagcgttaatattttgttaaaattcgcgttaaatttttgttaaatcagctcattttttaaccaataggccgaaatcggcaaaatcccttataaatcaaaagaatagaccgagatagggttgagtgttgttccagtttggaacaagagtccactattaaagaacgtggactccaacgtcaaagggcgaaaaaccgtctatcagggcgatggcccactacgtgaaccatcaccctaatcaagttttttggggtcgaggtgccgtaaagcactaaatcggaaccctaaagggagcccccgatttagagcttgacggggaaagccggcgaacgtggcgagaaaggaagggaagaaagcgaaaggagcgggcgctagggcgctggcaagtgtagcggtcacgctgcgcgtaaccaccacacccgccgcgcttaatgcgccgctacagggcgcgtccattcgccattcaggctgcgcaactgttgggaagggcgatcggtgcgggcctcttcgctattacgccagctggcgaaagggggatgtgctgcaaggcgattaagttgggtaacgccagggttttcccagtcacgacgttgtaaaacgacggccagtgaattgtaatacgactcactatagggcgaattgggcccgacgtcgcatgcgctgatgacactttggtctgaaagagatgcattttgaatcccaaacttgcagtgcccaagtgacatacatctccgcgttttggaaaatgttcagaaacagttgattgtgttggaatggggaatggggaatggaaaaatgactcaagtatcaattccaaaaacttctctggctggcagtacctactgtccatactactgcattttctccagtcaggccactctatactcgacgacacagtagtaaaacccagataatttcgacataaacaagaaaacagacccaataatatttatatatagtcagccgtttgtccagttcagactgtaatagccgaaaaaaaatccaaagtttctattctaggaaaatatattccaatatttttaattcttaatctcatttattttattctagcgaaatacatttcagctacttgagacatgtgatacccacaaatcggattcggactcggttgttcagaagagcatatggcattcgtgctcgcttgttcacgtattcttcctgttccatctcttggccgacaatcacacaaaaatggggttttttttttaattctaatgattcattacagcaaaattgagatatagcagaccacgtattccataatcaccaaggaagttcttgggcgtcttaattaactcacctgcaggattgagactatgaatggattcccgtgcccgtattactctactaatttgatcttggaacgcgaaaatacgtttctaggactccaaagaatctcaactcttgtccttactaaatatactacccatagttgatggtttacttgaacagagaggacatgttcacttgacccaaagtttctcgcatctcttggatatttgaacaacggcgtccactgaccgtcagttatccagtcacaaaacccccacattcatacattcccatgtacgtttacaaagttctcaattccatcgtgcaaatcaaaatcacatctattcattcatcatatataaacccatcatgtctactaacactcacaactccatagaaaacatcgactcagaacacacgctccatgcggccgcttactgagccttggcaccgggctgcttctcggccattcgagcgaactgggacaggtatcggagcaggatgacgagaccttcatggggcagagggtttcggtaggggaggttgtgcttctggcacagctgttccacctggtaggaaacggcagtgaggttgtgtcgaggcagggtgggccagagatggtgctcgatctggtagttcaggcctccaaagaaccagtcagtaatgatgcctcgtcgaatgttcatggtctcatggatctgacccacagagaagccatgtccgtcccagacggaatcaccgatcttctccagagggtagtggttcatgaagaccacgatggcaattccgaagccaccgacgagctcggaaacaaagaacaccagcatcgaggtcaggatggagggcataaagaagaggtggaacagggtcttgagagtccagtgcagagcgagtccaatggcctctttcttgtactgagatcggtagaactggttgtctcggtccttgagggatcgaacggtcagcacagactggaaacaccagatgaatcgcaggagaatacagatgaccaggaaatagtactgttggaactgaatgagctttcgggagatgggagaagctcgagtgacatcgtcctcggaccaggcgagcagaggcaggttatcaatgtcgggatcgtgaccctgaacgttggtagcagaatgatgggcgttgtgtctgtccttccaccaggtcacggagaagccctggagtccgttgccaaagaccagacccaggacgttattccagtttcggttcttgaaggtctggtggtggcagatgtcatgagacagccatcccatttgctggtagtgcataccgagcacgagagcaccaatgaagtacaggtggtactggaccagcatgaagaaggcaagcacgccaagacccagggtggtcaagatcttgtacgagtaccagaggggagaggcgtcaaacatgccagtggcgatcagctcttctcggagctttcggaaatcctcctgagcttcgttgacggcagcctggggaggcagctcggaagcctggttgatcttgggcattcgcttgagcttgtcgaaggcttcctgagagtgcataaccatgaaggcgtcagtagcatctcgtccctggtagttctcaatgatttcagctccaccagggtggaagttcacccaagcggagacgtcgtacacctttccgtcgatgacgaggggcagagcctgtcgagaagccttcaccatggttgtgaattagggtggtgagaatggttggttgtagggaagaatcaaaggccggtctcgggatccgtgggtatatatatatatatatatatatacgatccttcgttacctccctgttctcaaaactgtggtttttcgtttttcgttttttgctttttttgatttttttagggccaactaagcttccagatttcgctaatcacctttgtactaattacaagaaaggaagaagctgattagagttgggctttttatgcaactgtgctactccttatctctgatatgaaagtgtagacccaatcacatcatgtcatttagagttggtaatactgggaggatagataaggcacgaaaacgagccatagcagacatgctgggtgtagccaagcagaagaaagtagatgggagccaattgacgagcgagggagctacgccaatccgacatacgacacgctgagatcgtcttggccggggggtacctacagatgtccaagggtaagtgcttgactgtaattgtatgtctgaggacaaatatgtagtcagccgtataaagtcataccaggcaccagtgccatcatcgaaccactaactctctatgatacatgcctccggtattattgtaccatgcgtcgctttgttacatacgtatcttgcctttttctctcagaaactccagactttggctattggtcgagataagcccggaccatagtgagtctttcacactctacatttctcccttgctccaactatttaaattccttcacttcaagttcattcttcatctgcttctgttttactttgacaggcaaatgaagacatggtacgacttgatggaggccaagaacgccatttcaccccgagacaccgaagtgcctgaaatcctggctgcccccattgataacatcggaaactacggtattccggaaagtgtatatagaacctttccccagcttgtgtctgtggatatggatggtgtaatcccctttgagtactcgtcttggcttctctccgagcagtatgaggctctctaatctagcgcatttaatatctcaatgtatttatatatttatcttctcatgcggccgcttactgagccttggcaccgggctgcttctcggccattcgagcgaactgggacaggtatcggagcaggatgacgagaccttcatggggcagagggtttcggtaggggaggttgtgcttctggcacagctgttccacctggtaggaaacggcagtgaggttgtgtcgaggcagggtgggccagagatggtgctcgatctggtagttcaggcctccaaagaaccagtcagtaatgatgcctcgtcgaatgttcatggtctcatggatctgacccacagagaagccatgtccgtcccagacggaatcaccgatcttctccagagggtagtggttcatgaagaccacgatggcaattccgaagccaccgacgagctcggaaacaaagaacaccagcatcgaggtcaggatggagggcataaagaagaggtggaacagggtcttgagagtccagtgcagagcgagtccaatggcctctttcttgtactgagatcggtagaactggttgtctcggtccttgagggatcgaacggtcagcacagactggaaacaccagatgaatcgcaggagaatacagatgaccaggaaatagtactgttggaactgaatgagctttcgggagatgggagaagctcgagtgacatcgtcctcggaccaggcgagcagaggcaggttatcaatgtcgggatcgtgaccctgaacgttggtagcagaatgatgggcgttgtgtctgtccttccaccaggtcacggagaagccctggagtccgttgccaaagaccagacccaggacgttattccagtttcggttcttgaaggtctggtggtggcagatgtcatgagacagccatcccatttgctggtagtgcataccgagcacgagagcaccaatgaagtacaggtggtactggaccagcatgaagaaggcaagcacgccaagacccagggtggtcaagatcttgtacgagtaccagaggggagaggcgtcaaacatgccagtggcgatcagctcttctcggagctttcggaaatcctcctgagcttcgttgacggcagcctggggaggcagctcggaagcctggttgatcttgggcattcgcttgagcttgtcgaaggcttcctgagagtgcataaccatgaaggcgtcagtagcatctcgtccctggtagttctcaatgatttcagctccaccagggtggaagttcacccaagcggagacgtcgtacacctttccgtcgatgacgaggggcagagcctgtcgagaagccttcaccatgggcaggacctgtgttagtacattgtcggggagtcatcaattggttcgacaggttgtcgactgttagtatgagctcaattgggctctggtgggtcgatgacacttgtcatctgtttctgttgggtcatgtttccatcaccttctatggtactcacaattcgtccgattcgcccgaatccgttaataccgactttgatggccatgttgatgtgtgtttaattcaagaatgaatatagagaagagaagaagaaaaaagattcaattgagccggcgatgcagacccttatataaatgttgccttggacagacggagcaagcccgcccaaacctacgttcggtataatatgttaagctttttaacacaaaggtttggcttggggtaacctgatgtggtgcaaaagaccgggcgttggcgagccattgcgcgggcgaatggggccgtgactcgtctcaaattcgagggcgtgcctcaattcgtgcccccgtggctttttcccgccgtttccgccccgtttgcaccactgcagccgcttctttggttcggacaccttgctgcgagctaggtgccttgtgctacttaaaaagtggcctcccaacaccaacatgacatgagtgcgtgggccaagacacgttggcggggtcgcagtcggctcaatggcccggaaaaaacgctgctggagctggttcggacgcagtccgccgcggcgtatggatatccgcaaggttccatagcgccattgccctccgtcggcgtctatcccgcaacctctaaatagagcgggaatataacccaagcttcttttttttcctttaacacgcacacccccaactatcatgttgctgctgctgtttgactctactctgtggaggggtgctcccacccaacccaacctacaggtggatccggcgctgtgattggctgataagtctcctatccggactaattctgaccaatgggacatgcgcgcaggacccaaatgccgcaattacgtaaccccaacgaaatgcctacccctctttggagcccagcggccccaaatccccccaagcagcccggttctaccggcttccatctccaagcacaagcagcccggaattcctttacctgcaggataacttcgtataatgtatgctatacgaagttatgatctctctcttgagcttttccataacaagttcttctgcctccaggaagtccatgggtggtttgatcatggttttggtgtagtggtagtgcagtggtggtattgtgactggggatgtagttgagaataagtcatacacaagtcagctttcttcgagcctcatataagtataagtagttcaacgtattagcactgtacccagcatctccgtatcgagaaacacaacaacatgccccattggacagatcatgcggatacacaggttgtgcagtatcatacatactcgatcagacaggtcgtctgaccatcatacaagctgaacaagcgctccatacttgcacgctctctatatacacagttaaattacatatccatagtctaacctctaacagttaatcttctggtaagcctcccagccagccttctggtatcgcttggcctcctcaataggatctcggttctggccgtacagacctcggccgacaattatgatatccgttccggtagacatgacatcctcaacagttcggtactgctgtccgagagcgtctcccttgtcgtcaagacccaccccgggggtcagaataagccagtcctcagagtcgcccttaggtcggttctgggcaatgaagccaaccacaaactcggggtcggatcgggcaagctcaatggtctgcttggagtactcgccagtggccagagagcccttgcaagacagctcggccagcatgagcagacctctggccagcttctcgttgggagaggggactaggaactccttgtactgggagttctcgtagtcagagacgtcctccttcttctgttcagagacagtttcctcggcaccagctcgcaggccagcaatgattccggttccgggtacaccgtgggcgttggtgatatcggaccactcggcgattcggtgacaccggtactggtgcttgacagtgttgccaatatctgcgaactttctgtcctcgaacaggaagaaaccgtgcttaagagcaagttccttgagggggagcacagtgccggcgtaggtgaagtcgtcaatgatgtcgatatgggttttgatcatgcacacataaggtccgaccttatcggcaagctcaatgagctccttggtggtggtaacatccagagaagcacacaggttggttttcttggctgccacgagcttgagcactcgagcggcaaaggcggacttgtggacgttagctcgagcttcgtaggagggcattttggtggtgaagaggagactgaaataaatttagtctgcagaactttttatcggaaccttatctggggcagtgaagtatatgttatggtaatagttacgagttagttgaacttatagatagactggactatacggctatcggtccaaattagaaagaacgtcaatggctctctgggcgtcgcctttgccgacaaaaatgtgatcatgatgaaagccagcaatgacgttgcagctgatattgttgtcggccaaccgcgccgaaaacgcagctgtcagacccacagcctccaacgaagaatgtatcgtcaaagtgatccaagcacactcatagttggagtcgtactccaaaggcggcaatgacgagtcagacagatactcgtcgacgcgataacttcgtataatgtatgctatacgaagttatcgtacgatagttagtagacaacaatcgataacgtctcgtaccaaccacagattacgacccattcgcagtcacagttcactagggtttgggttgcatccgttgagagcggtttgtttttaaccttctccatgtgctcactcaggttttgggttcagatcaaatcaaggcgtgaaccactttgtttgaggacaaatgtgacacaaccaaccagtgtcaggggcaagtccgtgacaaaggggaagatacaatgcaattactgacagttacagactgcctcgatgccctaaccttgccccaaaataagacaactgtcctcgtttaagcgcaaccctattcagcgtcacgtcataatagcgtttggatagcactagtctatgaggagcgttttatgttgcggtgagggcgattggtgctcatatgggttcaattgaggtggcggaacgagcttagtcttcaattgaggtgcgagcgacacaattgggtgtcacgtggcctaattgacctcgggtcgtggagtccccagttatacagcaaccacgaggtgcatgggtaggagacgtcaccagacaatagggttttttttggactggagagggttgggcaaaagcgctcaacgggctgtttggggagctgtgggggaggaattggcgatatttgtgaggttaacggctccgatttgcgtgttttgtcgctcctgcatctccccatacccatatcttccctccccacctctttccacgataattttacggatcagcaataaggttccttctcctagtttccacgtccatatatatctatgctgcgtcgtccttttcgtgacatcaccaaaacacatacaacaatggctgttactgacgtccttaagcgaaagtccggtgtcatcgtcggcgacgatgtccgagccgtgagtatccacgacaagatcagtgtcgagacgacgcgttttgtgtaatgacacaatccgaaagtcgctagcaacacacactctctacacaaactaacccagctctccatggcctccacctcggctctgcccaagcagaaccctgccctccgacgaaccgtcacttccaccactgtgaccgactcggagtctgctgccgtctctccctccgattctcccagacactcggcctcctctacatcgctgtcttccatgtccgaggtggacattgccaagcccaagtccgagtacggtgtcatgctggatacctacggcaaccagttcgaagttcccgacttcaccatcaaggacatctacaacgctattcccaagcactgcttcaagcgatctgctctcaagggatacggctacattcttcgagacattgtcctcctgactaccactttcagcatctggtacaactttgtgacacccgagtacattccctccactcctgctcgagccggtctgtgggctgtgtacaccgttcttcagggactcttcggtactggactgtgggtcattgcccacgagtgtggacatggtgctttctccgattcccgaatcatcaacgacattactggctgggtgcttcactcttccctgcttgttccctacttcagctggcaaatctcccaccggaagcatcacaaggccactggaaacatggagcgagacatggtcttcgttcctcgaacccgagagcagcaagctactcgactcggcaagatgacccacgaactcgcccatcttaccgaggaaactcctgctttcaccctgctcatgcttgtgcttcagcaactggtcggttggcccaactatctcattaccaacgttactggacacaactaccatgagcggcagcgagagggtcgaggcaagggaaagcacaacggtcttggcggtggagttaaccatttcgatccccgatctcctctgtacgagaacagcgacgccaagctcatcgtgctctccgacattggcattggtcttatggccaccgctctgtactttctcgttcagaagttcggattctacaacatggccatctggtacttcgttccctacttgtgggttaaccactggctcgtcgccattacctttctgcagcacacagatcctactcttccccactacaccaacgacgagtggaactttgtgcgaggtgccgctgcaaccatcgaccgagagatgggcttcattggacgtcatctgctccacggcattatcgagactcacgtcctgcatcactacgtctcttccattcccttctacaatgcggacgaagctaccgaggccatcaaacctatcatgggcaagcactatcgagctgatgtccaggacggtcctcgaggattcattcgagccatgtaccgatctgcacgaatgtgccagtgggttgaaccctccgctggtgccgagggagctggcaagggtgtcctgttctttcgaaaccgaaacaatgtgggcactcctcccgctgtcatcaagcccgttgcctaagc

SEQ ID NO: 226 - DNA, 1434 bp, Fusarium moniliforme
  CDS (1)..(1434): synthetic delta-12 desaturase (codon-optimized for Yarrowia lipolytica)
  ref <302>: TITLE: DELTA-12 DESATURASES SUITABLE FOR ALTERING LEVELS OF POLYUNSATURATED FATTY ACIDS IN OLEAGINOUS YEAST
  ref <310>: PATENT DOCUMENT NUMBER: WO 2005/047485
  ref <311>: PATENT FILING DATE: 2004-11-12
  ref <312>: PUBLICATION DATE: 2005-05-26
  ref <313>: RELEVANT RESIDUES IN SEQ ID NO: (1)..(1434)
  ref <302>: TITLE: DELTA-12 DESATURASES SUITABLE FOR ALTERING LEVELS OF POLYUNSATURATED FATTY ACIDS IN OLEAGINOUS YEAST
  ref <310>: PATENT DOCUMENT NUMBER: US 2005-0216975-A1
  ref <311>: PATENT FILING DATE: 2004-11-10
  ref <312>: PUBLICATION DATE: 2005-09-29
  ref <313>: RELEVANT RESIDUES IN SEQ ID NO: (1)..(1434)
atggcctccacctcggctctgcccaagcagaaccctgccctccgacgaaccgtcacttccaccactgtgaccgactcggagtctgctgccgtctctccctccgattctcccagacactcggcctcctctacatcgctgtcttccatgtccgaggtggacattgccaagcccaagtccgagtacggtgtcatgctggatacctacggcaaccagttcgaagttcccgacttcaccatcaaggacatctacaacgctattcccaagcactgcttcaagcgatctgctctcaagggatacggctacattcttcgagacattgtcctcctgactaccactttcagcatctggtacaactttgtgacacccgagtacattccctccactcctgctcgagccggtctgtgggctgtgtacaccgttcttcagggactcttcggtactggactgtgggtcattgcccacgagtgtggacatggtgctttctccgattcccgaatcatcaacgacattactggctgggtgcttcactcttccctgcttgttccctacttcagctggcaaatctcccaccggaagcatcacaaggccactggaaacatggagcgagacatggtcttcgttcctcgaacccgagagcagcaagctactcgactcggcaagatgacccacgaactcgcccatcttaccgaggaaactcctgctttcaccctgctcatgcttgtgcttcagcaactggtcggttggcccaactatctcattaccaacgttactggacacaactaccatgagcggcagcgagagggtcgaggcaagggaaagcacaacggtcttggcggtggagttaaccatttcgatccccgatctcctctgtacgagaacagcgacgccaagctcatcgtgctctccgacattggcattggtcttatggccaccgctctgtactttctcgttcagaagttcggattctacaacatggccatctggtacttcgttccctacttgtgggttaaccactggctcgtcgccattacctttctgcagcacacagatcctactcttccccactacaccaacgacgagtggaactttgtgcgaggtgccgctgcaaccatcgaccgagagatgggcttcattggacgtcatctgctccacggcattatcgagactcacgtcctgcatcactacgtctcttccattcccttctacaatgcggacgaagctaccgaggccatcaaacctatcatgggcaagcactatcgagctgatgtccaggacggtcctcgaggattcattcgagccatgtaccgatctgcacgaatgtgccagtgggttgaaccctccgctggtgccgagggagctggcaagggtgtcctgttctttcgaaaccgaaacaatgtgggcactcctcccgctgtcatcaagcccgttgcctaa

SEQ ID NO: 227 - protein, 477 aa, Fusarium moniliforme; identical to SEQ ID NO: 197

SEQ ID NO: 228 - DNA, 15812 bp, Artificial Sequence
  Plasmid pZKL2-5U89GC
gtacgttatcatttgaacagtgaaaggctacagtaacagaagcagttgtaaacttcattccgttgattctgtactacagtaccccactacgccgcttccgctgacactgttcaacccaaaaactacatctgcgtgcgctgtgtaaggctatcatcagatacatactgtagattctgtagatgcgaacctgcttgtatcatatacatccccctccccctgacctgcacaagcaagcaatgtgacattgatattgctgcttatctagtgccgaggatgtgaaagccgagactcaaacatttcttttactctcttgttcctgaccagacctggcggagattacgccagtatgattcttgcaggtctgagacaagcctggaacagccaacatttatttttcgaagcgagaaacatgccacaccccggcacgttcagagatgcatatgatttgtttttcgagtaacagtacccccccccccccccccaatgaaaccagtattactcacaccatcctcattcaaagcgttacactgattacgcgcccatcaacgacagcatgaggggactgctgatctgatctaatcaaatgactacaaaaatcgcaataatgaagagcaaacgacaaaaaagaaacaggttaaccaatcccgcttcaatgtctcaccacaatccagcactgtttctcattacctcctccctctaatttcagagttgcatcagggtccttgatggcgcgccagctgcattaatgaatcggccaacgcgcggggagaggcggtttgcgtattgggcgctcttccgcttcctcgctcactgactcgctgcgctcggtcgttcggctgcggcgagcggtatcagctcactcaaaggcggtaatacggttatccacagaatcaggggataacgcaggaaagaacatgtgagcaaaaggccagcaaaaggccaggaaccgtaaaaaggccgcgttgctggcgtttttccataggctccgcccccctgacgagcatcacaaaaatcgacgctcaagtcagaggtggcgaaacccgacaggactataaagataccaggcgtttccccctggaagctccctcgtgcgctctcctgttccgaccctgccgcttaccggatacctgtccgcctttctcccttcgggaagcgtggcgctttctcatagctcacgctgtaggtatctcagttcggtgtaggtcgttcgctccaagctgggctgtgtgcacgaaccccccgttcagcccgaccgctgcgccttatccggtaactatcgtcttgagtccaacccggtaagacacgacttatcgccactggcagcagccactggtaacaggattagcagagcgaggtatgtaggcggtgctacagagttcttgaagtggtggcctaactacggctacactagaagaacagtatttggtatctgcgctctgctgaagccagttaccttcggaaaaagagttggtagctcttgatccggcaaacaaaccaccgctggtagcggtggtttttttgtttgcaagcagcagattacgcgcagaaaaaaaggatctcaagaagatcctttgatcttttctacggggtctgacgctcagtggaacgaaaactcacgttaagggattttggtcatgagattatcaaaaaggatcttcacctagatccttttaaattaaaaatgaagttttaaatcaatctaaagtatatatgagtaaacttggtctgacagttaccaatgcttaatcagtgaggcacctatctcagcgatctgtctatttcgttcatccatagttgcctgactccccgtcgtgtagataactacgatacgggagggcttaccatctggccccagtgctgcaatgataccgcgagacccacgctcaccggctccagatttatcagcaataaaccagccagccggaagggccgagcgcagaagtggtcctgcaactttatccgcctccatccagtctattaattgttgccgggaagctagagtaagtagttcgccagttaatagtttgcgcaacgttgttgccattgctacaggcatcgtggtgtcacgctcgtcgtttggtatggcttcattcagctccggttcccaacgatcaaggcgagttacatgatcccccatgttgtgcaaaaaagcggttagctccttcggtcctccgatcgttgtcagaagtaagttggccgcagtgttatcactcatggttatggcagcactgcataattctcttactgtcatgccatccgtaagatgcttttctgtgactggtgagtactcaaccaagtcattctgagaatagtgtatgcggcgaccgagttgctcttgcccggcgtcaatacgggataataccgcgccacatagcagaactttaaaagtgctcatcattggaaaacgttcttcggggcgaaaactctcaaggatcttaccgctgttgagatccagttcgatgtaacccactcgtgcacccaactgatcttcagcatcttttactttcaccagcgtttctgggtgagcaaaaacaggaaggcaaaatgccgcaaaaaagggaataagggcgacacggaaatgttgaatactcatactcttcctttttcaatattattgaagcatttatcagggttattgtctcatgagcggatacatatttgaatgtatttagaaaaataaacaaataggggttccgcgcacatttccccgaaaagtgccacctgatgcggtgtgaaataccgcacagatgcgtaaggagaaaataccgcatcaggaaattgtaagcgttaatattttgttaaaattcgcgttaaatttttgttaaatcagctcattttttaaccaataggccgaaatcggcaaaatcccttataaatcaaaagaatagaccgagatagggttgagtgttgttccagtttggaacaagagtccactattaaagaacgtggactccaacgtcaaagggcgaaaaaccgtctatcagggcgatggcccactacgtgaaccatcaccctaatcaagttttttggggtcgaggtgccgtaaagcactaaatcggaaccctaaagggagcccccgatttagagcttgacggggaaagccggcgaacgtggcgagaaaggaagggaagaaagcgaaaggagcgggcgctagggcgctggcaagtgtagcggtcacgctgcgcgtaaccaccacacccgccgcgcttaatgcgccgctacagggcgcgtccattcgccattcaggctgcgcaactgttgggaagggcgatcggtgcgggcctcttcgctattacgccagctggcgaaagggggatgtgctgcaaggcgattaagttgggtaacgccagggttttcccagtcacgacgttgtaaaacgacggccagtgaattgtaatacgactcactatagggcgaattgggcccgacgtcgcatgctggtttcgatttgtcttagaggaacgcatatacagtaatcatagagaataaacgatattcatttattaaagtagatagttgaggtagaagttgtaaagagtgataaatagcttagataccacagacaccctcggtgacgaagtactgcagatggtttccaatcacattgacctgctggagcagagtgttaccggcagagcactgtttattgctctggccctggcacatgacaacgttggagagaggagggtggatcaggggccagtcaataaagacctcaccagagcagtgctggtaaccgtcccagaagggcacttgagggacgatatctcctcggtgggtgattcggtagagctttcggtctttggacaccttggagacatcggggttctcctggccaaagaagagtttatcgacccagttagcaaagccagcgttaccgacaatgggctgaccaagagtaacaacgaggggatcgtggccgttaaccttgaggttgattccgaacagaagggctgcagctcctccgagagagtgaccggtgacagcaatctggtagtcgggatactgctcaatcacagagtcgagcttggggccgatctgattgtaggtgttgttgtaggactggatgaagccattgtggacaagacagtcatcacaagtagcagtagaagagatgttagcagcaagatcaaagttaattaactcacctgcaggattgagactatgaatggattcccgtgcccgtattactctactaatttgatcttggaacgcgaaaatacgtttctaggactccaaagaatctcaactcttgtccttactaaatatactacccatagttgatggtttacttgaacagagaggacatgttcacttgacccaaagtttctcgcatctcttggatatttgaacaacggcgtccactgaccgtcagttatccagtcacaaaacccccacattcatacattcccatgtacgtttacaaagttctcaattccatcgtgcaaatcaaaatcacatctattcattcatcatatataaacccatcatgtctactaacactcacaactccatagaaaacatcgactcagaacacacgctccatgcggccgcttaggaatcctgagcgtccttgacacagtgaaccacaccgactttgtgcatgtacttgagggtggaaatgatgttgcccacaatggtagggtagaagacgtaccgaactccgtgtcgttcgcaacactctcggacagcttgctgcacgaagggatagtgccaagacgacattcgaggaaagaggtgatgctcgatctggaagttgagaccgccagtaaagaacatggcaatgggtccaccgtaggtggaagaggtctccacctgagctctgtaccagtcgatctgatcggcttcaacgtccttctcggagctcttgaccttgcagttcttgtcggggattcgctccgagccatcgaagttgtgagacaagatgaaaaagaaggtgaggaaggcaccggtagcagtgggcaccagaggaatggtgatgagcagggaggttccagtgagataccagggcaagaaggcggttcgaaagatgaagaaagctcgcataacgaatgcaagggttcggtaccgtcgcagaaagccgttctctcgcatggctgtgacagactcgggaatggtgtcgttgtgctgcattcggaagatgtagagagggttgtacaccagcgaaacgccgtaggctccaagcacgaggtacatgtaccaggcctggaatcggtgaaaccactttcgagcagtgttggcagcagggtagttgtggaacacaaggaatggttctgcggactcggcatccaggtcgagaccatgctgattggtgtaggtgtgatgtcgcatgatgtgagactgcagccagatccatctggacgatccaatgacgtcgatgccgtaggcaaagagagcgttgacccagggctttttgctgatggcaccatgagaggcatcgtgctgaatggacaggccgatctgcatgtgcatgaatccagtcaagagaccccacagcaccattccggtagtagcccagtgccactcgcaaaaggcggtgacagcaatgatgccaacggttcgcagccagaatccaggtgtggcataccagttccgacctttcatgacctctcgcatagttcgcttgacgtcctgtgcaaagggagagtcgtaggtgtagacaatgtccttggaggttcggtcgtgcttgcctcgcacgaactgttgaagcagcttcgagttctcgggcttgacgtaagggtgcatggagtagaacagaggagaagcatcggaggcaccagaagcgaggatcaagtcgcctccgggatggaccttggcaagaccttccagatcgtagagaatgccgtcgatggcaaccaggtcgggtcgctcgagcagctgctcggtagtaagggagagagccatggttgtgaattagggtggtgagaatggttggttgtagggaagaatcaaaggccggtctcgggatccgtgggtatatatatatatatatatatatacgatccttcgttacctccctgttctcaaaactgtggtttttcgtttttcgttttttgctttttttgatttttttagggccaactaagcttccagatttcgctaatcacctttgtactaattacaagaaaggaagaagctgattagagttgggctttttatgcaactgtgctactccttatctctgatatgaaagtgtagacccaatcacatcatgtcatttagagttggtaatactgggaggatagataaggcacgaaaacgagccatagcagacatgctgggtgtagccaagcagaagaaagtagatgggagccaattgacgagcgagggagctacgccaatccgacatacgacacgctgagatcgtcttggccggggggtacctacagatgtccaagggtaagtgcttgactgtaattgtatgtctgaggacaaatatgtagtcagccgtataaagtcataccaggcaccagtgccatcatcgaaccactaactctctatgatacatgcctccggtattattgtaccatgcgtcgctttgttacatacgtatcttgcctttttctctcagaaactccagaattctctctcttgagcttttccataacaagttcttctgcctccaggaagtccatgggtggtttgatcatggttttggtgtagtggtagtgcagtggtggtattgtgactggggatgtagttgagaataagtcatacacaagtcagctttcttcgagcctcatataagtataagtagttcaacgtattagcactgtacccagcatctccgtatcgagaaacacaacaacatgccccattggacagatcatgcggatacacaggttgtgcagtatcatacatactcgatcagacaggtcgtctgaccatcatacaagctgaacaagcgctccatacttgcacgctctctatatacacagttaaattacatatccatagtctaacctctaacagttaatcttctggtaagcctcccagccagccttctggtatcgcttggcctcctcaataggatctcggttctggccgtacagacctcggccgacaattatgatatccgttccggtagacatgacatcctcaacagttcggtactgctgtccgagagcgtctcccttgtcgtcaagacccaccccgggggtcagaataagccagtcctcagagtcgcccttaggtcggttctgggcaatgaagccaaccacaaactcggggtcggatcgggcaagctcaatggtctgcttggagtactcgccagtggccagagagcccttgcaagacagctcggccagcatgagcagacctctggccagcttctcgttgggagaggggactaggaactccttgtactgggagttctcgtagtcagagacgtcctccttcttctgttcagagacagtttcctcggcaccagctcgcaggccagcaatgattccggttccgggtacaccgtgggcgttggtgatatcggaccactcggcgattcggtgacaccggtactggtgcttgacagtgttgccaatatctgcgaactttctgtcctcgaacaggaagaaaccgtgcttaagagcaagttccttgagggggagcacagtgccggcgtaggtgaagtcgtcaatgatgtcgatatgggttttgatcatgcacacataaggtccgaccttatcggcaagctcaatgagctccttggtggtggtaacatccagagaagcacacaggttggttttcttggctgccacgagcttgagcactcgagcggcaaaggcggacttgtggacgttagctcgagcttcgtaggagggcattttggtggtgaagaggagactgaaataaatttagtctgcagaactttttatcggaaccttatctggggcagtgaagtatatgttatggtaatagttacgagttagttgaacttatagatagactggactatacggctatcggtccaaattagaaagaacgtcaatggctctctgggcgtcgcctttgccgacaaaaatgtgatcatgatgaaagccagcaatgacgttgcagctgatattgttgtcggccaaccgcgccgaaaacgcagctgtcagacccacagcctccaacgaagaatgtatcgtcaaagtgatccaagcacactcatagttggagtcgtactccaaaggcggcaatgacgagtcagacagatactcgtcgaccttttccttgggaaccaccaccgtcagcccttctgactcacgtattgtagccaccgacacaggcaacagtccgtggatagcagaatatgtcttgtcggtccatttctcaccaactttaggcgtcaagtgaatgttgcagaagaagtatgtgccttcattgagaatcggtgttgctgatttcaataaagtcttgagatcagtttggccagtcatgttgtggggggtaattggattgagttatcgcctacagtctgtacaggtatactcgctgcccactttatactttttgattccgctgcacttgaagcaatgtcgtttaccaaaagtgagaatgctccacagaacacaccccagggtatggttgagcaaaaaataaacactccgatacggggaatcgaaccccggtctccacggttctcaagaagtattcttgatgagagcgtatcgatcgaggaagaggacaagcggctgcttcttaagtttgtgacatcagtatccaaggcaccattgcaaggattcaaggctttgaacccgtcatttgccattcgtaacgctggtagacaggttgatcggttccctacggcctccacctgtgtcaatcttctcaagctgcctgactatcaggacattgatcaacttcggaagaaacttttgtatgccattcgatcacatgctggtttcgatttgtcttagaggaacgcatatacagtaatcatagagaataaacgatattcatttattaaagtagatagttgaggtagaagttgtaaagagtgataaatagcggccgctcactgaatctttttggctcccttgtgctttcggacgatgtaggtctgcacgtagaagttgaggaacagacacaggacagtaccaacgtagaagtagttgaaaaaccagccaaacattctcattccatcttgtcggtagcagggaatgttccggtacttccagacgatgtagaagccaacgttgaactgaatgatctgcatagaagtaatcagggacttgggcatagggaacttgagcttgatcagtcgggtccaatagtagccgtacatgatccagtgaatgaagccgttgagcagcacaaagatccaaacggcttcgtttcggtagttgtagaacagccacatgtccataggagctccgagatggtgaaagaactgcaaccaggtcagaggcttgcccatgaggggcagatagaaggagtcaatgtactcgaggaacttgctgaggtagaacagctgagtggtgattcggaagacattgttgtcgaaagccttctcgcagttgtcggacatgacaccaatggtgtacatggcgtaggccatagagaggaaggagcccagcgagtagatggacatgagcaggttgtagttggtgaacacaaacttcattcgagactgacccttgggtccgagaggaccaagggtgaacttcaggatgacgaaggcgatggagaggtacagcacctcgcagtgcgaggcatcagaccagagctgagcatagtcgaccttgggaagaacctcctggccaatggagacgatttcgttcacgacctccatggttgatgtgtgtttaattcaagaatgaatatagagaagagaagaagaaaaaagattcaattgagccggcgatgcagacccttatataaatgttgccttggacagacggagcaagcccgcccaaacctacgttcggtataatatgttaagctttttaacacaaaggtttggcttggggtaacctgatgtggtgcaaaagaccgggcgttggcgagccattgcgcgggcgaatggggccgtgactcgtctcaaattcgagggcgtgcctcaattcgtgcccccgtggctttttcccgccgtttccgccccgtttgcaccactgcagccgcttctttggttcggacaccttgctgcgagctaggtgccttgtgctacttaaaaagtggcctcccaacaccaacatgacatgagtgcgtgggccaagacacgttggcggggtcgcagtcggctcaatggcccggaaaaaacgctgctggagctggttcggacgcagtccgccgcggcgtatggatatccgcaaggttccatagcgccattgccctccgtcggcgtctatcccgcaacctctaaatagagcgggaatataacccaagcttcttttttttcctttaacacgcacacccccaactatcatgttgctgctgctgtttgactctactctgtggaggggtgctcccacccaacccaacctacaggtggatccggcgctgtgattggctgataagtctcctatccggactaattctgaccaatgggacatgcgcgcaggacccaaatgccgcaattacgtaaccccaacgaaatgcctacccctctttggagcccagcggccccaaatccccccaagcagcccggttctaccggcttccatctccaagcacaagcagcccggttctaccggcttccatctccaagcacccctttctccacaccccacaaaaagacccgtgcaggacatcctactgcgtgtttaaacaccactaaaaccccacaaaatatatcttaccgaatatacagatctactatagaggaacaattgccccggagaagacggccaggccgcctagatgacaaattcaacaactcacagctgactttctgccattgccactaggggggggcctttttatatggccaagccaagctctccacgtcggttgggctgcacccaacaataaatgggtagggttgcaccaacaaagggatgggatggggggtagaagatacgaggataacggggctcaatggcacaaataagaacgaatactgccattaagactcgtgatccagcgactgacaccattgcatcatctaagggcctcaaaactacctcggaactgctgcgctgatctggacaccacagaggttccgagcactttaggttgcaccaaatgtcccaccaggtgcaggcagaaaacgctggaacagcgtgtacagtttgtcttaacaaaaagtgagggcgctgaggtcgagcagggtggtgtgacttgttatagcctttagagctgcgaaagcgcgtatggatttggctcatcaggccagattgagggtctgtggacacatgtcatgttagtgtacttcaatcgccccctggatatagccccgacaataggccgtggcctcatttttttgccttccgcacatttccattgctcggtacccacaccttgcttctcctgcacttgccaaccttaatactggtttacattgaccaacatcttacaagcggggggcttgtctagggtatatataaacagtggctctcccaatcggttgccagtctcttttttcctttctttccccacagattcgaaatctaaactacacatcacacaatgcctgttactgacgtccttaagcgaaagtccggtgtcatcgtcggcgacgatgtccgagccgtgagtatccacgacaagatcagtgtcgagacgacgcgttttgtgtaatgacacaatccgaaagtcgctagcaacacacactctctacacaaactaacccagctctccatggtgaaggcttctcgacaggctctgcccctcgtcatcgacggaaaggtgtacgacgtctccgcttgggtgaacttccaccctggtggagctgaaatcattgagaactaccagggacgagatgctactgacgccttcatggttatgcactctcaggaagccttcgacaagctcaagcgaatgcccaagatcaaccaggcttccgagctgcctccccaggctgccgtcaacgaagctcaggaggatttccgaaagctccgagaagagctgatcgccactggcatgtttgacgcctctcccctctggtactcgtacaagatcttgaccaccctgggtcttggcgtgcttgccttcttcatgctggtccagtaccacctgtacttcattggtgctctcgtgctcggtatgcactaccagcaaatgggatggctgtctcatgacatctgccaccaccagaccttcaagaaccgaaactggaataacgtcctgggtctggtctttggcaacggactccagggcttctccgtgacctggtggaaggacagacacaacgcccatcattctgctaccaacgttcagggtcacgatcccgacattgataacctgcctctgctcgcctggtccgaggacgatgtcactcgagcttctcccatctcccgaaagctcattcagttccaacagtactatttcctggtcatctgtattctcctgcgattcatctggtgtttccagtctgtgctgaccgttcgatccctcaaggaccgagacaaccagttctaccgatctcagtacaagaaagaggccattggactcgctctgcactggactctcaagaccctgttccacctcttctttatgccctccatcctgacctcgatgctggtgttctttgtttccgagctcgtcggtggcttcggaattgccatcgtggtcttcatgaaccactaccctctggagaagatcggtgattccgtctgggacggacatggcttctctgtgggtcagatccatgagaccatgaacattcgacgaggcatcattactgactggttctttggaggcctgaactaccagatcgagcaccatctctggcccaccctgcctcgacacaacctcactgccgtttcctaccaggtggaacagctgtgccagaagcacaacctcccctaccgaaaccctctgccccatgaaggtctcgtcatcctgctccgatacctgtcccagttcgctcgaatggccgagaagcagcccggtgccaaggctcagtaagcggccgcatgagaagataaatatataaatacattgagatattaaatgcgctagattagagagcctcatactgctcggagagaagccaagacgagtactcaaaggggattacaccatccatatccacagacacaagctggggaaaggttctatatacactttccggaataccgtagtttccgatgttatcaatgggggcagccaggatttcaggcacttcggtgtctcggggtgaaatggcgttcttggcctccatcaagtcgtaccatgtcttcatttgcctgtcaaagtaaaacagaagcagatgaagaatgaacttgaagtgaaggaatttaaatagttggagcaagggagaaatgtagagtgtgaaagactcactatggtccgggcttatctcgaccaatagccaaagtctggagtttctgagagaaaaaggcaagatacgtatgtaacaaagcgacgcatggtacaataataccggaggcatgtatcatagagagttagtggttcgatgatggcactggtgcctggtatgactttatacggctgactacatatttgtcctcagacatacaattacagtcaagcacttacccttggacatctgtaggtaccccccggccaagacgatctcagcgtgtcgtatgtcggattggcgtagctccctcgctcgtcaattggctcccatctactttcttctgcttggctacacccagcatgtctgctatggctcgttttcgtgccttatctatcctcccagtattaccaactctaaatgacatgatgtgattgggtctacactttcatatcagagataaggagtagcacagttgcataaaaagcccaactctaatcagcttcttcctttcttgtaattagtacaaaggtgattagcgaaatctggaagcttagttggccctaaaaaaatcaaaaaaagcaaaaaacgaaaaacgaaaaaccacagttttgagaacagggaggtaacgaaggatcgtatatatatatatatatatatatacccacggatcccgagaccggcctttgattcttccctacaaccaaccattctcaccaccctaattcacaaccatgggcgtattcattaaacaggagcagcttccggctctcaagaagtacaagtactccgccgaggatcactcgttcatctccaacaacattctgcgccccttctggcgacagtttgtcaaaatcttccctctgtggatggcccccaacatggtgactctgctgggcttcttctttgtcattgtgaacttcatcaccatgctcattgttgatcccacccacgaccgcgagcctcccagatgggtctacctcacctacgctctgggtctgttcctttaccagacatttgatgcctgtgacggatcccatgcccgacgaactggccagagtggaccccttggagagctgtttgaccactgtgtcgacgccatgaatacctctctgattctcacggtggtggtgtccaccacccatatgggatataacatgaagctactgattgtgcagattgccgctctcggaaacttctacctgtcgacctgggagacctaccataccggaactctgtacctttctggcttctctggtcctgttgaaggtatcttgattctggtggctcttttcgtcctcaccttcttcactggtcccaacgtgtacgctctgaccgtctacgaggctcttcccgagtccatcacttcgctgctgcctgccagcttcctggacgtcaccatcacccagatctacattggattcggagtgctgggcatggtgttcaacatctacggcgcctgcggaaacgtgatcaagtactacaacaacaagggcaagagcgctctccccgccattctcggaatcgccccctttggcatcttctacgtcggcgtctttgcctgggcccatgttgctcctctgcttctctccaagtacgccatcgtctatctgtttgccattggggctgcctttgccatgcaagtcggccagatgattcttgcccatctcgtgcttgctccctttccccactggaacgtgctgctcttcttcccctttgtgggactggcagtgcactacattgcacccgtgtttggctgggacgccgatatcgtgtcggttaacactctcttcacctgttttggcgccaccctctccatttacgccttctttgtgcttgagatcatcgacgagatcaccaactacctcgatatctggtgtctgcgaatcaagtaccctcaggagaagaagaccgaataagcggccgcatggagcgtgtgttctgagtcgatgttttctatggagttgtgagtgttagtagacatgatgggtttatatatgatgaatgaatagatgtgattttgatttgcacgatggaattgagaactttgtaaacgtacatgggaatgtatgaatgtgggggttttgtgactggataactgacggtcagtggacgccgttgttcaaatatccaagagatgcgagaaactttgggtcaagtgaacatgtcctctctgttcaagtaaaccatcaactatgggtagtatatttagtaaggacaagagttgagattctttggagtcctagaaacgtattttcgcgttccaagatcaaattagtagagtaatacgggcacgggaatccattcatagtctcaatcctgcaggtgagttaattaatcgagcttggcgtaatcatggtcatagctgtttcctgtgtgaaattgttatccgctcacaattccacacaac

SEQ ID NO: 229 - DNA, 1185 bp, Yarrowia lipolytica
  CDS (1)..(1185): diacylglycerol cholinephosphotransferase (YlCPT1)
  ref <302>: TITLE: HIGH EICOSAPENTAENOIC ACID PRODUCING STRAINS OF
  ref <310>: PATENT DOCUMENT NUMBER: WO 2006/052870
  ref <311>: PATENT FILING DATE: 2005-11-03
  ref <312>: PUBLICATION DATE: 2006-05-18
  ref <313>: RELEVANT RESIDUES IN SEQ ID NO: (1)..(1185)
  ref <302>: TITLE: HIGH EICOSAPENTAENOIC ACID PRODUCING STRAINS OF
  ref <310>: PATENT DOCUMENT NUMBER: US 2006-0115881-A1
  ref <311>: PATENT FILING DATE: 2005-11-02
  ref <312>: PUBLICATION DATE: 2006-06-01
  ref <313>: RELEVANT RESIDUES IN SEQ ID NO: (1)..(1185)
atgggcgtattcattaaacaggagcagcttccggctctcaagaagtacaagtactccgccgaggatcactcgttcatctccaacaacattctgcgccccttctggcgacagtttgtcaaaatcttccctctgtggatggcccccaacatggtgactctgttgggcttcttctttgtcattgtgaacttcatcaccatgctcattgttgatcccacccacgaccgcgagcctcccagatgggtctacctcacctacgctctgggtctgttcctttaccagacatttgatgcctgtgacggatcccatgcccgacgaactggccagagtggaccccttggagagctgtttgaccactgtgtcgacgccatgaatacctctctgattctcacggtggtggtgtccaccacccatatgggatataacatgaagctgctgattgtgcagattgccgctctcggaaacttctacctgtcgacctgggagacctaccataccggaactctgtacctttctggcttctctggtcctgttgaaggtatcttgattctggtggctcttttcgtcctcaccttcttcactggtcccaacgtgtacgctctgaccgtctacgaggctcttcccgaatccatcacttcgctgctgcctgccagcttcctggacgtcaccatcacccagatctacattggattcggagtgctgggcatggtgttcaacatctacggcgcctgcggaaacgtgatcaagtactacaacaacaagggcaagagcgctctccccgccattctcggaatcgccccctttggcatcttctacgtcggcgtctttgcctgggcccatgttgctcctctgcttctctccaagtacgccatcgtctatctgtttgccattggggctgcctttgccatgcaagtcggccagatgattcttgcccatctcgtgcttgctcccttcccccactggaacgtgctgctcttcttcccctttgtgggactggcagtgcactacattgcacccgtgtttggctgggacgccgatatcgtgtcggttaacactctcttcacctgttttggcgccaccctctccatttacgccttctttgtgcttgagatcatcgacgagatcaccaactacctcgatatctggtgtctgcgaatcaagtaccctcaggagaagaagactgagtaa

SEQ ID NO: 230 - protein, 394 aa, Yarrowia lipolytica; identical to SEQ ID NO: 194

SEQ ID NO: 231 - DNA, 6303 bp, Artificial Sequence
  Plasmid pZKUE3S
ggccgcaagtgtggatggggaagtgagtgcccggttctgtgtgcacaattggcaatccaagatggatggattcaacacagggatatagcgagctacgtggtggtgcgaggatatagcaacggatatttatgtttgacacttgagaatgtacgatacaagcactgtccaagtacaatactaaacatactgtacatactcatactcgtacccgggcaacggtttcacttgagtgcagtggctagtgctcttactcgtacagtgtgcaatactgcgtatcatagtctttgatgtatatcgtattcattcatgttagttgcgtacgaggaaactgtctctgaacagaagaaggaggacgtctctgactacgagaactcccagtacaaggagttcctagtcccctctcccaacgagaagctggccagaggtctgctcatgctggccgagctgtcttgcaagggctctctggccactggcgagtactccaagcagaccattgagcttgcccgatccgaccccgagtttgtggttggcttcattgcccagaaccgacctaagggcgactctgaggactggcttattctgacccccggggtgggtcttgacgacaagggagacgctctcggacagcagtaccgaactgttgaggatgtcatgtctaccggaacggatatcataattgtcggccgaggtctgtacggccagaaccgagatcctattgaggaggccaagcgataccagaaggctggctgggaggcttaccagaagattaactgttagaggttagactatggatatgtaatttaactgtgtatatagagagcgtgcaagtatggagcgcttgttcagcttgtatgatggtcagacgacctgtctgatcgagtatgtatgatactgcacaacctgtgtatccgcatgatctgtccaatggggcatgttgttgtgtttctcgatacggagatgctgggtacagtgctaatacgttgaactacttatacttatatgaggctcgaagaaagctgacttgtgtatgacttaattaatcgagcttggcgtaatcatggtcatagctgtttcctgtgtgaaattgttatccgctcacaattccacacaacatacgagccggaagcataaagtgtaaagcctggggtgcctaatgagtgagctaactcacattaattgcgttgcgctcactgcccgctttccagtcgggaaacctgtcgtgccagctgcattaatgaatcggccaacgcgcggggagaggcggtttgcgtattgggcgctcttccgcttcctcgctcactgactcgctgcgctcggtcgttcggctgcggcgagcggtatcagctcactcaaaggcggtaatacggttatccacagaatcaggggataacgcaggaaagaacatgtgagcaaaaggccagcaaaaggccaggaaccgtaaaaaggccgcgttgctggcgtttttccataggctccgcccccctgacgagcatcacaaaaatcgacgctcaagtcagaggtggcgaaacccgacaggactataaagataccaggcgtttccccctggaagctccctcgtgcgctctcctgttccgaccctgccgcttaccggatacctgtccgcctttctcccttcgggaagcgtggcgctttctcatagctcacgctgtaggtatctcagttcggtgtaggtcgttcgctccaagctgggctgtgtgcacgaaccccccgttcagcccgaccgctgcgccttatccggtaactatcgtcttgagtccaacccggtaagacacgacttatcgccactggcagcagccactggtaacaggattagcagagcgaggtatgtaggcggtgctacagagttcttgaagtggtggcctaactacggctacactagaaggacagtatttggtatctgcgctctgctgaagccagttaccttcggaaaaagagttggtagctcttgatccggcaaacaaaccaccgctggtagcggtggtttttttgtttgcaagcagcagattacgcgcagaaaaaaaggatctcaagaagatcctttgatcttttctacggggtctgacgctcagtggaacgaaaactcacgttaagggattttggtcatgagattatcaaaaaggatcttcacctagatccttttaaattaaaaatgaagttttaaatcaatctaaagtatatatgagtaaacttggtctgacagttaccaatgcttaatcagtgaggcacctatctcagcgatctgtctatttcgttcatccatagttgcctgactccccgtcgtgtagataactacgatacgggagggcttaccatctggccccagtgctgcaatgataccgcgagacccacgctcaccggctccagatttatcagcaataaaccagccagccggaagggccgagcgcagaagtggtcctgcaactttatccgcctccatccagtctattaattgttgccgggaagctagagtaagtagttcgccagttaatagtttgcgcaacgttgttgccattgctacaggcatcgtggtgtcacgctcgtcgtttggtatggcttcattcagctccggttcccaacgatcaaggcgagttacatgatcccccatgttgtgcaaaaaagcggttagctccttcggtcctccgatcgttgtcagaagtaagttggccgcagtgttatcactcatggttatggcagcactgcataattctcttactgtcatgccatccgtaagatgcttttctgtgactggtgagtactcaaccaagtcattctgagaatagtgtatgcggcgaccgagttgctcttgcccggcgtcaatacgggataataccgcgccacatagcagaactttaaaagtgctcatcattggaaaacgttcttcggggcgaaaactctcaaggatcttaccgctgttgagatccagttcgatgtaacccactcgtgcacccaactgatcttcagcatcttttactttcaccagcgtttctgggtgagcaaaaacaggaaggcaaaatgccgcaaaaaagggaataagggcgacacggaaatgttgaatactcatactcttcctttttcaatattattgaagcatttatcagggttattgtctcatgagcggatacatatttgaatgtatttagaaaaataaacaaataggggttccgcgcacatttccccgaaaagtgccacctgacgcgccctgtagcggcgcattaagcgcggcgggtgtggtggttacgcgcagcgtgaccgctacacttgccagcgccctagcgcccgctcctttcgctttcttcccttcctttctcgccacgttcgccggctttccccgtcaagctctaaatcgggggctccctttagggttccgatttagtgctttacggcacctcgaccccaaaaaacttgattagggtgatggttcacgtagtgggccatcgccctgatagacggtttttcgccctttgacgttggagtccacgttctttaatagtggactcttgttccaaactggaacaacactcaaccctatctcggtctattcttttgatttataagggattttgccgatttcggcctattggttaaaaaatgagctgatttaacaaaaatttaacgcgaattttaacaaaatattaacgcttacaatttccattcgccattcaggctgcgcaactgttgggaagggcgatcggtgcgggcctcttcgctattacgccagctggcgaaagggggatgtgctgcaaggcgattaagttgggtaacgccagggttttcccagtcacgacgttgtaaaacgacggccagtgaattgtaatacgactcactatagggcgaattgggtaccgggccccccctcgaggtcgacgagtatctgtctgactcgtcattgcatgcctttggagtacgactccaactatgagtgtgcttggatcactttgacgatacattcttcgttggaggctgtgggtctgacagctgcgttttcggcgcggttggccgacaacaatatcagctgcaacgtcattgctggctttcatcatgatcacatttttgtcggcaaaggcgacgcccagagagccattgacgttctttctaatttggaccgatagccgtatagtccagtctatctataagttcaactaactcgtaactattaccataacatatacttcactgccccagataaggttccgataaaaagttctgcagactaaatttatttcagtctcctcttcaccaccaaaatgccctcctacgaagctcgagtgctcaagctcgtggcagccaagaaaaccaacctgtgtgcttctctggatgttaccaccaccaaggagctcattgagcttgccgataaggtcggaccttatgtgtgcatgatcaaaacccatatcgacatcattgacgacttcacctacgccggcactgtgctccccctcaaggaacttgctcttaagcacggtttcttcctgttcgaggacagaaagttcgcagatattggcaacactgtcaagcaccagtaccggtgtcaccgaatcgccgagtggtccgatatcaccaacgcccacggtgtttaaacccggaaccggaatcgataagcttgatatcgaattcatgctgttcatcgtggttaatgctgctgtgtgctgtgtgtgtgtgttgtttggcgctcattgttgcgttatgcagcgtacaccacaatattggaagcttattagcctttctattttttcgtttgcaaggcttaacaacattgctgtggagagggatggggatatggaggccgctggagggagtcggagaggcgttttggagcggcttggcctggcgcccagctcgcgaaacgcacctaggaccctttggcacgccgaaatgtgccacttttcagtctagtaacgccttacctacgtcattccatgcgtgcatgtttgcgccttttttcccttgcccttgatcgccacacagtacagtgcactgtacagtggaggttttgggggggtcttagatgggagctaaaagcggcctagcggtacactagtgggattgtatggagtggcatggagcctaggtggagcctgacaggacgcacgaccggctagcccgtgacagacgatgggtggctcctgttgtccaccgcgtacaaatgtttgggccaaagtcttgtcagccttgcttgcgaacctaattcccaattttgtcacttcgcacccccattgatcgagccctaacccctgcccatcaggcaatccaattaagctcgcattgtctgccttgtttagtttggctcctgcccgtttcggcgtccacttgcacaaacacaaacaagcattatatataaggctcgtctctccctcccaaccacactcacttttttgcccgtcttcccttgctaacacaaaagtcaagaacacaaacaaccaccccaacccccttacacacaagacatatctacaccatggagtctggacccatgcctgctggcattcccttccctgagtactatgacttctttatggactggaagactcccctggccatcgctgccacctacactgctgccgtcggtctcttcaaccccaaggttggcaaggtctcccgagtggttgccaagtcggctaacgcaaagcctgccgagcgaacccagtccggagctgccatgactgccttcgtctttgtgcacaacctcattctgtgtgtctactctggcatcaccttctactacatgtttcctgctatggtcaagaacttccgaacccacacactgcacgaagcctactgcgacacggatcagtccctctggaacaacgcacttggctactggggttacctcttctacctgtccaagttctacgaggtcattgacaccatcatcatcatcctgaagggacgacggtcctcgctgcttcagacctaccaccatgctggagccatgattaccatgtggtctggcatcaactaccaagccactcccatttggatctttgtggtcttcaactccttcattcacaccatcatgtactgttactatgccttcacctctatcggattccatcctcctggcaaaaagtacctgacttcgatgcagattactcagtttctggtcggtatcaccattgccgtgtcctacctcttcgttcctggctgcatccgaacacccggtgctcagatggctgtctggatcaacgtcggctacctgtttcccttgacctatctgttcgtggactttgccaagcgaacctactccaagcgatctgccattgccgctcagaaaaaggctcagtaagc

SEQ ID NO: 232 - DNA, 15877 bp, Artificial Sequence
  Plasmid pZKL1-2SP98C
aaatgatgtcgacgcagtaggatgtcctgcacgggtctttttgtggggtgtggagaaaggggtgcttggatcgatggaagccggtagaaccgggctgcttgtgcttggagatggaagccggtagaaccgggctgcttggggggatttggggccgctgggctccaaagaggggtaggcatttcgttggggttacgtaattgcggcatttgggtcctgcgcgcatgtcccattggtcagaattagtccggataggagacttatcagccaatcacagcgccggatccacctgtaggttgggttgggtgggagcacccctccacagagtagagtcaaacagcagcagcaacatgatagttgggggtgtgcgtgttaaaggaaaaaaaagaagcttgggttatattcccgctctatttagaggttgcgggatagacgccgacggagggcaatggcgctatggaaccttgcggatatccatacgccgcggcggactgcgtccgaaccagctccagcagcgttttttccgggccattgagccgactgcgaccccgccaacgtgtcttggcccacgcactcatgtcatgttggtgttgggaggccactttttaagtagcacaaggcacctagctcgcagcaaggtgtccgaaccaaagaagcggctgcagtggtgcaaacggggcggaaacggcgggaaaaagccacgggggcacgaattgaggcacgccctcgaatttgagacgagtcacggccccattcgcccgcgcaatggctcgccaacgcccggtcttttgcaccacatcaggttaccccaagccaaacctttgtgttaaaaagcttaacatattataccgaacgtaggtttgggcgggcttgctccgtctgtccaaggcaacatttatataagggtctgcatcgccggctcaattgaatcttttttcttcttctcttctctatattcattcttgaattaaacacacatcaaccatgggcgtattcattaaacaggagcagcttccggctctcaagaagtacaagtactccgccgaggatcactcgttcatctccaacaacattctgcgccccttctggcgacagtttgtcaaaatcttccctctgtggatggcccccaacatggtgactctgctgggcttcttctttgtcattgtgaacttcatcaccatgctcattgttgatcccacccacgaccgcgagcctcccagatgggtctacctcacctacgctctgggtctgttcctttaccagacatttgatgcctgtgacggatcccatgcccgacgaactggccagagtggaccccttggagagctgtttgaccactgtgtcgacgccatgaatacctctctgattctcacggtggtggtgtccaccacccatatgggatataacatgaagctactgattgtgcagattgccgctctcggaaacttctacctgtcgacctgggagacctaccataccggaactctgtacctttctggcttctctggtcctgttgaaggtatcttgattctggtggctcttttcgtcctcaccttcttcactggtcccaacgtgtacgctctgaccgtctacgaggctcttcccgagtccatcacttcgctgctgcctgccagcttcctggacgtcaccatcacccagatctacattggattcggagtgctgggcatggtgttcaacatctacggcgcctgcggaaacgtgatcaagtactacaacaacaagggcaagagcgctctccccgccattctcggaatcgccccctttggcatcttctacgtcggcgtctttgcctgggcccatgttgctcctctgcttctctccaagtacgccatcgtctatctgtttgccattggggctgcctttgccatgcaagtcggccagatgattcttgcccatctcgtgcttgctccctttccccactggaacgtgctgctcttcttcccctttgtgggactggcagtgcactacattgcacccgtgtttggctgggacgccgatatcgtgtcggttaacactctcttcacctgttttggcgccaccctctccatttacgccttctttgtgcttgagatcatcgacgagatcaccaactacctcgatatctggtgtctgcgaatcaagtaccctcaggagaagaagaccgaataagcggccgcatggagcgtgtgttctgagtcgatgttttctatggagttgtgagtgttagtagacatgatgggtttatatatgatgaatgaatagatgtgattttgatttgcacgatggaattgagaactttgtaaacgtacatgggaatgtatgaatgtgggggttttgtgactggataactgacggtcagtggacgccgttgttcaaatatccaagagatgcgagaaactttgggtcaagtgaacatgtcctctctgttcaagtaaaccatcaactatgggtagtatatttagtaaggacaagagttgagattctttggagtcctagaaacgtattttcgcgttccaagatcaaattagtagagtaatacgggcacgggaatccattcatagtctcaatcctgcaggtgagttaattaatcgagcttggcgtaatcatggtcatagctgtttcctgtgtgaaattgttatccgctcacaattccacacaacgtacgatagttagtagacaacaatcagaacatctccctccttatataatcacacaggccagaacgcgctaaactaaagcgctttggacactatgttacattggcattgattgaactgaaaccacagtctccctcgcctgaatcgagcaatggatgttgtcggaagtcaacttcactagaagagcggttctatgccttgtcaagatcatatcataaactcactctgtattaccccatctatagaacacttgttatgaatgggcggaaacattccgctatatgcacctttccacactaatgcaaagatgtgcatcttcaacgggtagtaagactggttccgacttccgttgcatggagagcaatgacctcgataatgcgaacatcccccacatatacactcttacacaggccaatataatctgtgcatttactaaatatttaagtctatgcacctgcttgatgaaaagcggcacggatggtatcatctagtttccgccaatccaagaaccaactgtgttggcagtggtgtagcccatggcacacagaccaaagatgaaaatacagacatcggcggttcgagccgtggtgcctcgagcaacacccttgtaatgcaaaagaggagggtaaatgtacaccagaggcacacatgcaaacgatccggtgagagcgacgaaccgatcgagatcgtcggcacctccccatgcaacaaaggcggtgacaaacacaaggaagaaccggaaaatgttcttctgccacttgatggtagagttgtacttgcctgatcgggtgaagagaccattctcgatgattcggatggcgcgccagctgcattaatgaatcggccaacgcgcggggagaggcggtttgcgtattgggcgctcttccgcttcctcgctcactgactcgctgcgctcggtcgttcggctgcggcgagcggtatcagctcactcaaaggcggtaatacggttatccacagaatcaggggataacgcaggaaagaacatgtgagcaaaaggccagcaaaaggccaggaaccgtaaaaaggccgcgttgctggcgtttttccataggctccgcccccctgacgagcatcacaaaaatcgacgctcaagtcagaggtggcgaaacccgacaggactataaagataccaggcgtttccccctggaagctccctcgtgcgctctcctgttccgaccctgccgcttaccggatacctgtccgcctttctcccttcgggaagcgtggcgctttctcatagctcacgctgtaggtatctcagttcggtgtaggtcgttcgctccaagctgggctgtgtgcacgaaccccccgttcagcccgaccgctgcgccttatccggtaactatcgtcttgagtccaacccggtaagacacgacttatcgccactggcagcagccactggtaacaggattagcagagcgaggtatgtaggcggtgctacagagttcttgaagtggtggcctaactacggctacactagaagaacagtatttggtatctgcgctctgctgaagccagttaccttcggaaaaagagttggtagctcttgatccggcaaacaaaccaccgctggtagcggtggtttttttgtttgcaagcagcagattacgcgcagaaaaaaaggatctcaagaagatcctttgatcttttctacggggtctgacgctcagtggaacgaaaactcacgttaagggattttggtcatgagattatcaaaaaggatcttcacctagatccttttaaattaaaaatgaagttttaaatcaatctaaagtatatatgagtaaacttggtctgacagttaccaatgcttaatcagtgaggcacctatctcagcgatctgtctatttcgttcatccatagttgcctgactccccgtcgtgtagataactacgatacgggagggcttaccatctggccccagtgctgcaatgataccgcgagacccacgctcaccggctccagatttatcagcaataaaccagccagccggaagggccgagcgcagaagtggtcctgcaactttatccgcctccatccagtctattaattgttgccgggaagctagagtaagtagttcgccagttaatagtttgcgcaacgttgttgccattgctacaggcatcgtggtgtcacgctcgtcgtttggtatggcttcattcagctccggttcccaacgatcaaggcgagttacatgatcccccatgttgtgcaaaaaagcggttagctccttcggtcctccgatcgttgtcagaagtaagttggccgcagtgttatcactcatggttatggcagcactgcataattctcttactgtcatgccatccgtaagatgcttttctgtgactggtgagtactcaaccaagtcattctgagaatagtgtatgcggcgaccgagttgctcttgcccggcgtcaatacgggataataccgcgccacatagcagaactttaaaagtgctcatcattggaaaacgttcttcggggcgaaaactctcaaggatcttaccgctgttgagatccagttcgatgtaacccactcgtgcacccaactgatcttcagcatcttttactttcaccagcgtttctgggtgagcaaaaacaggaaggcaaaatgccgcaaaaaagggaataagggcgacacggaaatgttgaatactcatactcttcctttttcaatattattgaagcatttatcagggttattgtctcatgagcggatacatatttgaatgtatttagaaaaataaacaaataggggttccgcgcacatttccccgaaaagtgccacctgatgcggtgtgaaataccgcacagatgcgtaaggagaaaataccgcatcaggaaattgtaagcgttaatattttgttaaaattcgcgttaaatttttgttaaatcagctcattttttaaccaataggccgaaatcggcaaaatcccttataaatcaaaagaatagaccgagatagggttgagtgttgttccagtttggaacaagagtccactattaaagaacgtggactccaacgtcaaagggcgaaaaaccgtctatcagggcgatggcccactacgtgaaccatcaccctaatcaagttttttggggtcgaggtgccgtaaagcactaaatcggaaccctaaagggagcccccgatttagagcttgacggggaaagccggcgaacgtggcgagaaaggaagggaagaaagcgaaaggagcgggcgctagggcgctggcaagtgtagcggtcacgctgcgcgtaaccaccacacccgccgcgcttaatgcgccgctacagggcgcgtccattcgccattcaggctgcgcaactgttgggaagggcgatcggtgcgggcctcttcgctattacgccagctggcgaaagggggatgtgctgcaaggcgattaagttgggtaacgccagggttttcccagtcacgacgttgtaaaacgacggccagtgaattgtaatacgactcactatagggcgaattgggcccgacgtcgcatgcttagaagtgaggattacaagaagcctctggatatcaatgatgaacgtactcagcggctggtcaagcatttcgaccgtcgaatcgacgaggtgttcacctttgacaagcgagggttcccaattgatcacgttctcgagttgttcaaatcttctctcaacatctctctgcatgaactatctctgttgacgaacgtgtcacccactgttcctcgaacgcccttctccgagtttggtctgaacatcttcgatctcaaactgacccccgcagtgatcaatagtgccatgccactgccgatgcggtgcgaacatccctggagggattctcggagctctacacaatgcagattctgtcgtcgagtactctctaccttgctcgaatgacttattgtgctactactgcactcatgcttcgatcatgtgccctactgcaccccaaatttggtgatctgattgagacagagtaccctcttcagctgattcagaagatcatcagcaacatgaatgatgtggttgaccaggcaggctgttgtagtcacgtccttcacttcaagttcattcttcatctgcttctgttttactttgacaggcaaatgaagacatggtacgacttgatggaggccaagaacgccatttcaccccgagacaccgaagtgcctgaaatcctggctgcccccattgataacatcggaaactacggtattccggaaagtgtatatagaacctttccccagcttgtgtctgtggatatggatggtgtaatccccttaattaactcacctgcaggattgagactatgaatggattcccgtgcccgtattactctactaatttgatcttggaacgcgaaaatacgtttctaggactccaaagaatctcaactcttgtccttactaaatatactacccatagttgatggtttacttgaacagagaggacatgttcacttgacccaaagtttctcgcatctcttggatatttgaacaacggcgtccactgaccgtcagttatccagtcacaaaacccccacattcatacattcccatgtacgtttacaaagttctcaattccatcgtgcaaatcaaaatcacatctattcattcatcatatataaacccatcatgtctactaacactcacaactccatagaaaacatcgactcagaacacacgctccatgcggccgcttaggcaacgggcttgatgacagcgggaggagtgcccacattgtttcggtttcgaaagaacaggacacccttgccagctccctcggcaccagcggagggttcaacccactggcacattcgtgcagatcggtacatggctcgaatgaatcctcgaggaccgtcctggacatcagctcgatagtgcttgcccatgataggtttgatggcctcggtagcttcgtccgcattgtagaagggaatggaagagacgtagtgatgcaggacgtgagtctcgataatgccgtggagcagatgacgtccaatgaagcccatctctcggtcgatggttgcagcggcacctcgcacaaagttccactcgtcgttggtgtagtggggaagagtaggatctgtgtgctgcagaaaggtaatggcgacgagccagtggttaacccacaagtagggaacgaagtaccagatggccatgttgtagaatccgaacttctgaacgagaaagtacagagcggtggccataagaccaatgccaatgtcggagagcacgatgagcttggcgtcgctgttctcgtacagaggagatcggggatcgaaatggttaactccaccgccaagaccgttgtgctttcccttgcctcgaccctctcgctgccgctcatggtagttgtgtccagtaacgttggtaatgagatagttgggccaaccgaccagttgctgaagcacaagcatgagcagggtgaaagcaggagtttcctcggtaagatgggcgagttcgtgggtcatcttgccgagtcgagtagcttgctgctctcgggttcgaggaacgaagaccatgtctcgctccatgtttccagtggccttgtgatgcttccggtgggagatttgccagctgaagtagggaacaagcagggaagagtgaagcacccagccagtaatgtcgttgatgattcgggaatcggagaaagcaccatgtccacactcgtgggcaatgacccacagtccagtaccgaagagtccctgaagaacggtgtacacagcccacagaccggctcgagcaggagtggagggaatgtactcgggtgtcacaaagttgtaccagatgctgaaagtggtagtcaggaggacaatgtctcgaagaatgtagccgtatcccttgagagcagatcgcttgaagcagtgcttgggaatagcgttgtagatgtccttgatggtgaagtcgggaacttcgaactggttgccgtaggtatccagcatgacaccgtactcggacttgggcttggcaatgtccacctcggacatggaagacagcgatgtagaggaggccgagtgtctgggagaatcggagggagagacggcagcagactccgagtcggtcacagtggtggaagtgacggttcgtcggagggcagggttctgcttgggcagagccgaggtggaggccatggccattgctgtagatatgtcttgtgtgtaagggggttggggtggttgtttgtgttcttgacttttgtgttagcaagggaagacgggcaaaaaagtgagtgtggttgggagggagagacgagccttatatataatgcttgtttgtgtttgtgcaagtggacgccgaaacgggcaggagccaaactaaacaaggcagacaatgcgagcttaattggattgcctgatgggcaggggttagggctcgatcaatgggggtgcgaagtgacaaaattgggaattaggttcgcaagcaaggctgacaagactttggcccaaacatttgtacgcggtggacaacaggagccacccatcgtctgtcacgggctagccggtcgtgcgtcctgtcaggctccacctaggctccatgccactccatacaatcccactagtgtaccgctaggccgcttttagctcccatctaagacccccccaaaacctccactgtacagtgcactgtactgtgtggcgatcaagggcaagggaaaaaaggcgcaaacatgcacgcatggaatgacgtaggtaaggcgttactagactgaaaagtggcacatttcggcgtgccaaagggtcctaggtgcgtttcgcgagctgggcgccaggccaagccgctccaaaacgcctctccgactccctccagcggcctccatatccccatccctctccacagcaatgttgttaagccttgcaaacgaaaaaatagaaaggctaataagcttccaatattgtggtgtacgctgcataacgcaacaatgagcgccaaacaacacacacacacagcacacagcagcattaaccacgatgaacagcatgaattcctttacctgcaggataacttcgtataatgtatgctatacgaagttatgatctctctcttgagcttttccataacaagttcttctgcctccaggaagtccatgggtggtttgatcatggttttggtgtagtggtagtgcagtggtggtattgtgactggggatgtagttgagaataagtcatacacaagtcagctttcttcgagcctcatataagtataagtagttcaacgtattagcactgtacccagcatctccgtatcgagaaacacaacaacatgccccattggacagatcatgcggatacacaggttgtgcagtatcatacatactcgatcagacaggtcgtctgaccatcatacaagctgaacaagcgctccatacttgcacgctctctatatacacagttaaattacatatccatagtctaacctctaacagttaatcttctggtaagcctcccagccagccttctggtatcgcttggcctcctcaataggatctcggttctggccgtacagacctcggccgacaattatgatatccgttccggtagacatgacatcctcaacagttcggtactgctgtccgagagcgtctcccttgtcgtcaagacccaccccgggggtcagaataagccagtcctcagagtcgcccttaggtcggttctgggcaatgaagccaaccacaaactcggggtcggatcgggcaagctcaatggtctgcttggagtactcgccagtggccagagagcccttgcaagacagctcggccagcatgagcagacctctggccagcttctcgttgggagaggggactaggaactccttgtactgggagttctcgtagtcagagacgtcctccttcttctgttcagagacagtttcctcggcaccagctcgcaggccagcaatgattccggttccgggtacaccgtgggcgttggtgatatcggaccactcggcgattcggtgacaccggtactggtgcttgacagtgttgccaatatctgcgaactttctgtcctcgaacaggaagaaaccgtgcttaagagcaagttccttgagggggagcacagtgccggcgtaggtgaagtcgtcaatgatgtcgatatgggttttgatcatgcacacataaggtccgaccttatcggcaagctcaatgagctccttggtggtggtaacatccagagaagcacacaggttggttttcttggctgccacgagcttgagcactcgagcggcaaaggcggacttgtggacgttagctcgagcttcgtaggagggcattttggtggtgaagaggagactgaaataaatttagtctgcagaactttttatcggaaccttatctggggcagtgaagtatatgttatggtaatagttacgagttagttgaacttatagatagactggactatacggctatcggtccaaattagaaagaacgtcaatggctctctgggcgtcgcctttgccgacaaaaatgtgatcatgatgaaagccagcaatgacgttgcagctgatattgttgtcggccaaccgcgccgaaaacgcagctgtcagacccacagcctccaacgaagaatgtatcgtcaaagtgatccaagcacactcatagttggagtcgtactccaaaggcggcaatgacgagtcagacagatactcgtcgacgcgataacttcgtataatgtatgctatacgaagttatcgtacgatagttagtagacaacaatcgatcgaggaagaggacaagcggctgcttcttaagtttgtgacatcagtatccaaggcaccattgcaaggattcaaggctttgaacccgtcatttgccattcgtaacgctggtagacaggttgatcggttccctacggcctccacctgtgtcaatcttctcaagctgcctgactatcaggacattgatcaacttcggaagaaacttttgtatgccattcgatcacatgctggtttcgatttgtcttagaggaacgcatatacagtaatcatagagaataaacgatattcatttattaaagtagatagttgaggtagaagttgtaaagagtgataaatagcggccgctcactgaatctttttggctcccttgtgctttcggacgatgtaggtctgcacgtagaagttgaggaacagacacaggacagtaccaacgtagaagtagttgaaaaaccagccaaacattctcattccatcttgtcggtagcagggaatgttccggtacttccagacgatgtagaagccaacgttgaactgaatgatctgcatagaagtaatcagggacttgggcatagggaacttgagcttgatcagtcgggtccaatagtagccgtacatgatccagtgaatgaagccgttgagcagcacaaagatccaaacggcttcgtttcggtagttgtagaacagccacatgtccataggagctccgagatggtgaaagaactgcaaccaggtcagaggcttgcccatgaggggcagatagaaggagtcaatgtactcgaggaacttgctgaggtagaacagctgagtggtgattcggaagacattgttgtcgaaagccttctcgcagttgtcggacatgacaccaatggtgtacatggcgtaggccatagagaggaaggagcccagcgagtagatggacatgagcaggttgtagttggtgaacacaaacttcattcgagactgacccttgggtccgagaggaccaagggtgaacttcaggatgacgaaggcgatggagaggtacagcacctcgcagtgcgaggcatcagaccagagctgagcatagtcgaccttgggaagaacctcctggccaatggagacgatttcgttcacgacctccatggttgtgaattagggtggtgagaatggttggttgtagggaagaatcaaaggccggtctcgggatccgtgggtatatatatatatatatatatatacgatccttcgttacctccctgttctcaaaactgtggtttttcgtttttcgttttttgctttttttgatttttttagggccaactaagcttccagatttcgctaatcacctttgtactaattacaagaaaggaagaagctgattagagttgggctttttatgcaactgtgctactccttatctctgatatgaaagtgtagacccaatcacatcatgtcatttagagttggtaatactgggaggatagataaggcacgaaaacgagccatagcagacatgctgggtgtagccaagcagaagaaagtagatgggagccaattgacgagcgagggagctacgccaatccgacatacgacacgctgagatcgtcttggccggggggtacctacagatgtccaagggtaagtgcttgactgtaattgtatgtctgaggacaaatatgtagtcagccgtataaagtcataccaggcaccagtgccatcatcgaaccactaactctctatgatacatgcctccggtattattgtaccatgcgtcgctttgttacatacgtatcttgcctttttctctcagaaactccagactttggctattggtcgagataagcccggaccatagtgagtctttcacactctgtttaaacaccactaaaaccccacaaaatatatcttaccgaatatacagatctactatagaggaacaattgccccggagaagacggccaggccgcctagatgacaaattcaacaactcacagctgactttctgccattgccactaggggggggcctttttatatggccaagccaagctctccacgtcggttgggctgcacccaacaataaatgggtagggttgcaccaacaaagggatgggatggggggtagaagatacgaggataacggggctcaatggcacaaataagaacgaatactgccattaagactcgtgatccagcgactgacaccattgcatcatctaagggcctcaaaactacctcggaactgctgcgctgatctggacaccacagaggttccgagcactttaggttgcaccaaatgtcccaccaggtgcaggcagaaaacgctggaacagcgtgtacagtttgtcttaacaaaaagtgagggcgctgaggtcgagcagggtggtgtgacttgttatagcctttagagctgcgaaagcgcgtatggatttggctcatcaggccagattgagggtctgtggacacatgtcatgttagtgtacttcaatcgccccctggatatagccccgacaataggccgtggcctcatttttttgccttccgcacatttccattgctcggtacccacaccttgcttctcctgcacttgccaaccttaatactggtttacattgaccaacatcttacaagcggggggcttgtctagggtatatataaacagtggctctcccaatcggttgccagtctcttttttcctttctttccccacagattcgaaatctaaactacacatcacacaatgcctgttactgacgtccttaagcgaaagtccggtgtcatcgtcggcgacgatgtccgagccgtgagtatccacgacaagatcagtgtcgagacgacgcgttttgtgtaatgacacaatccgaaagtcgctagcaacacacactctctacacaaactaacccagctctccatggtgaaggcttctcgacaggctctgcccctcgtcatcgacggaaaggtgtacgacgtctccgcttgggtgaacttccaccctggtggagctgaaatcattgagaactaccagggacgagatgctactgacgccttcatggttatgcactctcaggaagccttcgacaagctcaagcgaatgcccaagatcaaccaggcttccgagctgcctccccaggctgccgtcaacgaagctcaggaggatttccgaaagctccgagaagagctgatcgccactggcatgtttgacgcctctcccctctggtactcgtacaagatcttgaccaccctgggtcttggcgtgcttgccttcttcatgctggtccagtaccacctgtacttcattggtgctctcgtgctcggtatgcactaccagcaaatgggatggctgtctcatgacatctgccaccaccagaccttcaagaaccgaaactggaataacgtcctgggtctggtctttggcaacggactccagggcttctccgtgacctggtggaaggacagacacaacgcccatcattctgctaccaacgttcagggtcacgatcccgacattgataacctgcctctgctcgcctggtccgaggacgatgtcactcgagcttctcccatctcccgaaagctcattcagttccaacagtactatttcctggtcatctgtattctcctgcgattcatctggtgtttccagtctgtgctgaccgttcgatccctcaaggaccgagacaaccagttctaccgatctcagtacaagaaagaggccattggactcgctctgcactggactctcaagaccctgttccacctcttctttatgccctccatcctgacctcgatgctggtgttctttgtttccgagctcgtcggtggcttcggaattgccatcgtggtcttcatgaaccactaccctctggagaagatcggtgattccgtctgggacggacatggcttctctgtgggtcagatccatgagaccatgaacattcgacgaggcatcattactgactggttctttggaggcctgaactaccagatcgagcaccatctctggcccaccctgcctcgacacaacctcactgccgtttcctaccaggtggaacagctgtgccagaagcacaacctcccctaccgaaaccctctgccccatgaaggtctcgtcatcctgctccgatacctgtcccagttcgctcgaatggccgagaagcagcccggtgccaaggctcagtaagcggccgcatgagaagataaatatataaatacattgagatattaaatgcgctagattagagagcctcatactgctcggagagaagccaagacgagtactcaaaggggattacaccatccatatccacagacacaagctggggaaaggttctatatacactttccggaataccgtagtttccgatgttatcaatgggggcagccaggatttcaggcacttcggtgtctcggggtgaaatggcgttcttggcctccatcaagtcgtaccatgtcttcatttgcctgtcaaagtaaaacagaagcagatgaagaatgaacttgaagtgaaggaattt

SEQ ID NO: 233 - DNA, 4313 bp, Artificial Sequence
  Plasmid pZKUM
taatcgagcttggcgtaatcatggtcatagctgtttcctgtgtgaaattgttatccgctcacaattccacacaacatacgagccggaagcataaagtgtaaagcctggggtgcctaatgagtgagctaactcacattaattgcgttgcgctcactgcccgctttccagtcgggaaacctgtcgtgccagctgcattaatgaatcggccaacgcgcggggagaggcggtttgcgtattgggcgctcttccgcttcctcgctcactgactcgctgcgctcggtcgttcggctgcggcgagcggtatcagctcactcaaaggcggtaatacggttatccacagaatcaggggataacgcaggaaagaacatgtgagcaaaaggccagcaaaaggccaggaaccgtaaaaaggccgcgttgctggcgtttttccataggctccgcccccctgacgagcatcacaaaaatcgacgctcaagtcagaggtggcgaaacccgacaggactataaagataccaggcgtttccccctggaagctccctcgtgcgctctcctgttccgaccctgccgcttaccggatacctgtccgcctttctcccttcgggaagcgtggcgctttctcatagctcacgctgtaggtatctcagttcggtgtaggtcgttcgctccaagctgggctgtgtgcacgaaccccccgttcagcccgaccgctgcgccttatccggtaactatcgtcttgagtccaacccggtaagacacgacttatcgccactggcagcagccactggtaacaggattagcagagcgaggtatgtaggcggtgctacagagttcttgaagtggtggcctaactacggctacactagaaggacagtatttggtatctgcgctctgctgaagccagttaccttcggaaaaagagttggtagctcttgatccggcaaacaaaccaccgctggtagcggtggtttttttgtttgcaagcagcagattacgcgcagaaaaaaaggatctcaagaagatcctttgatcttttctacggggtctgacgctcagtggaacgaaaactcacgttaagggattttggtcatgagattatcaaaaaggatcttcacctagatccttttaaattaaaaatgaagttttaaatcaatctaaagtatatatgagtaaacttggtctgacagttaccaatgcttaatcagtgaggcacctatctcagcgatctgtctatttcgttcatccatagttgcctgactccccgtcgtgtagataactacgatacgggagggcttaccatctggccccagtgctgcaatgataccgcgagacccacgctcaccggctccagatttatcagcaataaaccagccagccggaagggccgagcgcagaagtggtcctgcaactttatccgcctccatccagtctattaattgttgccgggaagctagagtaagtagttcgccagttaatagtttgcgcaacgttgttgccattgctacaggcatcgtggtgtcacgctcgtcgtttggtatggcttcattcagctccggttcccaacgatcaaggcgagttacatgatcccccatgttgtgcaaaaaagcggttagctccttcggtcctccgatcgttgtcagaagtaagttggccgcagtgttatcactcatggttatggcagcactgcataattctcttactgtcatgccatccgtaagatgcttttctgtgactggtgagtactcaaccaagtcattctgagaatagtgtatgcggcgaccgagttgctcttgcccggcgtcaatacgggataataccgcgccacatagcagaactttaaaagtgctcatcattggaaaacgttcttcggggcgaaaactctcaaggatcttaccgctgttgagatccagttcgatgtaacccactcgtgcacccaactgatcttcagcatcttttactttcaccagcgtttctgggtgagcaaaaacaggaaggcaaaatgccgcaaaaaagggaataagggcgacacggaaatgttgaatactcatactcttcctttttcaatattattgaagcatttatcagggttattgtctcatgagcggatacatatttgaatgtatttagaaaaataaacaaataggggttccgcgcacatttccccgaaaagtgccacctgacgcgccctgtagcggcgcattaagcgcggcgggtgtggtggttacgcgcagcgtgaccgctacacttgccagcgccctagcgcccgctcctttcgctttcttcccttcctttctcgccacgttcgccggctttccccgtcaagctctaaatcgggggctccctttagggttccgatttagtgctttacggcacctcgaccccaaaaaacttgattagggtgatggttcacgtagtgggccatcgccctgatagacggtttttcgccctttgacgttggagtccacgttctttaatagtggactcttgttccaaactggaacaacactcaaccctatctcggtctattcttttgatttataagggattttgccgatttcggcctattggttaaaaaatgagctgatttaacaaaaatttaacgcgaattttaacaaaatattaacgcttacaatttccattcgccattcaggctgcgcaactgttgggaagggcgatcggtgcgggcctcttcgctattacgccagctggcgaaagggggatgtgctgcaaggcgattaagttgggtaacgccagggttttcccagtcacgacgttgtaaaacgacggccagtgaattgtaatacgactcactatagggcgaattgggtaccgggccccccctcgaggtcgacgagtatctgtctgactcgtcattgccgcctttggagtacgactccaactatgagtgtgcttggatcactttgacgatacattcttcgttggaggctgtgggtctgacagctgcgttttcggcgcggttggccgacaacaatatcagctgcaacgtcattgctggctttcatcatgatcacatttttgtcggcaaaggcgacgcccagagagccattgacgttctttctaatttggaccgatagccgtatagtccagtctatctataagttcaactaactcgtaactattaccataacatatacttcactgccccagataaggttccgataaaaagttctgcagactaaatttatttcagtctcctcttcaccaccaaaatgccctcctacgaagctcgagtgctcaagctcgtggcagccaagaaaaccaacctgtgtgcttctctggatgttaccaccaccaaggagctcattgagcttgccgataaggtcggaccttatgtgtgcatgatcaaaacccatatcgacatcattgacgacttcacctacgccggcactgtgctccccctcaaggaacttgctcttaagcacggtttcttcctgttcgaggacagaaagttcgcagatattggcaacactgtcaagcaccagtaccggtgtcaccgaatcgccgagtggtccgatatcaccaacgcccacggtgtacccggaaccggaatcgattgctggcctgcgagctggtgcgtacgaggaaactgtctctgaacagaagaaggaggacgtctctgactacgagaactcccagtacaaggagttcctagtcccctctcccaacgagaagctggccagaggtctgctcatgctggccgagctgtcttgcaagggctctctggccactggcgagtactccaagcagaccattgagcttgcccgatccgaccccgagtttgtggttggcttcattgcccagaaccgacctaagggcgactctgaggactggcttattctgacccccggggtgggtcttgacgacaagggagacgctctcggacagcagtaccgaactgttgaggatgtcatgtctaccggaacggatatcataattgtcggccgaggtctgtacggccagaaccgagatcctattgaggaggccaagcgataccagaaggctggctgggaggcttaccagaagattaactgttagaggttagactatggatatgtaatttaactgtgtatatagagagcgtgcaagtatggagcgcttgttcagcttgtatgatggtcagacgacctgtctgatcgagtatgtatgatactgcacaacctgtgtatccgcatgatctgtccaatggggcatgttgttgtgtttctcgatacggagatgctgggtacagtgctaatacgttgaactacttatacttatatgaggctcgaagaaagctgacttgtgtatgacttaat

SEQ ID NO: 234 - DNA, 1459 bp, Artificial Sequence
  Synthetic mutant Ura3 gene, comprising a 33 bp deletion from +21 to +53, a  1 bp deletion at +376 and a 3 bp deletion from +400 to 403 of the Yarrowia Ura3 coding region (GenBank Accession No. AJ306421)
gagtatctgtctgactcgtcattgccgcctttggagtacgactccaactatgagtgtgcttggatcactttgacgatacattcttcgttggaggctgtgggtctgacagctgcgttttcggcgcggttggccgacaacaatatcagctgcaacgtcattgctggctttcatcatgatcacatttttgtcggcaaaggcgacgcccagagagccattgacgttctttctaatttggaccgatagccgtatagtccagtctatctataagttcaactaactcgtaactattaccataacatatacttcactgccccagataaggttccgataaaaagttctgcagactaaatttatttcagtctcctcttcaccaccaaaatgccctcctacgaagctcgagtgctcaagctcgtggcagccaagaaaaccaacctgtgtgcttctctggatgttaccaccaccaaggagctcattgagcttgccgataaggtcggaccttatgtgtgcatgatcaaaacccatatcgacatcattgacgacttcacctacgccggcactgtgctccccctcaaggaacttgctcttaagcacggtttcttcctgttcgaggacagaaagttcgcagatattggcaacactgtcaagcaccagtaccggtgtcaccgaatcgccgagtggtccgatatcaccaacgcccacggtgtacccggaaccggaatcgattgctggcctgcgagctggtgcgtacgaggaaactgtctctgaacagaagaaggaggacgtctctgactacgagaactcccagtacaaggagttcctagtcccctctcccaacgagaagctggccagaggtctgctcatgctggccgagctgtcttgcaagggctctctggccactggcgagtactccaagcagaccattgagcttgcccgatccgaccccgagtttgtggttggcttcattgcccagaaccgacctaagggcgactctgaggactggcttattctgacccccggggtgggtcttgacgacaagggagacgctctcggacagcagtaccgaactgttgaggatgtcatgtctaccggaacggatatcataattgtcggccgaggtctgtacggccagaaccgagatcctattgaggaggccaagcgataccagaaggctggctgggaggcttaccagaagattaactgttagaggttagactatggatatgtaatttaactgtgtatatagagagcgtgcaagtatggagcgcttgttcagcttgtatgatggtcagacgacctgtctgatcgagtatgtatgatactgcacaacctgtgtatccgcatgatctgtccaatggggcatgttgttgtgtttctcgatacggagatgctgggtacagtgctaatacgttgaactacttatacttatatgaggctcgaagaaagctgacttgtgtatgac

SEQ ID NO: 235 - DNA, 15966 bp, Artificial Sequence
  Plasmid pZKD2-5U89A2
gtacgtttcatgaaggcgggcagaaagtactcgatggtggagatgattgctcggaggtacttgttctgcggccagtatctctcagcaatcaggtgatactcctggacgtccagagggtagtatgtgtgcgtgggctccagatccaccgtcttgtgcagagttatggggaagtagcggccaaagagcttccagatgaagaagtttcttgaaataggcgagtatcgcttgaccactcctccgttggacggggagtcgtctttaacagcgtacactacatacgcaatcacaaatggccagagcagtggaattgcgcagcatagcatgaaaattgtgaggaaagtgggaatgctgaaaatgtgccagaccagagagaaggtctcacatcggttgagtaatggtgtcgatagcggggcatatcggattcccgcgattttgggtgccgtgtcgtttttgtctcgcgacttgtagtattgtgagtcgatagtcatagcttttgttttgtgtgacttgtctgttgcctgttgttagaagaaaaagtgggagcttatcagtcacggtccacgaacgatttcgtacttgtacgtaattggtcgtgagaactgttgcagagccggtgcttttttttgtggccaagtcgacaggtcgatttcggcgctgtgcgaggttgctgggatgtgctggtttggctgccaaatgtggggaagatttcaacctcggatttgacgtgtgtagaggcgcgccagctgcattaatgaatcggccaacgcgcggggagaggcggtttgcgtattgggcgctcttccgcttcctcgctcactgactcgctgcgctcggtcgttcggctgcggcgagcggtatcagctcactcaaaggcggtaatacggttatccacagaatcaggggataacgcaggaaagaacatgtgagcaaaaggccagcaaaaggccaggaaccgtaaaaaggccgcgttgctggcgtttttccataggctccgcccccctgacgagcatcacaaaaatcgacgctcaagtcagaggtggcgaaacccgacaggactataaagataccaggcgtttccccctggaagctccctcgtgcgctctcctgttccgaccctgccgcttaccggatacctgtccgcctttctcccttcgggaagcgtggcgctttctcatagctcacgctgtaggtatctcagttcggtgtaggtcgttcgctccaagctgggctgtgtgcacgaaccccccgttcagcccgaccgctgcgccttatccggtaactatcgtcttgagtccaacccggtaagacacgacttatcgccactggcagcagccactggtaacaggattagcagagcgaggtatgtaggcggtgctacagagttcttgaagtggtggcctaactacggctacactagaagaacagtatttggtatctgcgctctgctgaagccagttaccttcggaaaaagagttggtagctcttgatccggcaaacaaaccaccgctggtagcggtggtttttttgtttgcaagcagcagattacgcgcagaaaaaaaggatctcaagaagatcctttgatcttttctacggggtctgacgctcagtggaacgaaaactcacgttaagggattttggtcatgagattatcaaaaaggatcttcacctagatccttttaaattaaaaatgaagttttaaatcaatctaaagtatatatgagtaaacttggtctgacagttaccaatgcttaatcagtgaggcacctatctcagcgatctgtctatttcgttcatccatagttgcctgactccccgtcgtgtagataactacgatacgggagggcttaccatctggccccagtgctgcaatgataccgcgagacccacgctcaccggctccagatttatcagcaataaaccagccagccggaagggccgagcgcagaagtggtcctgcaactttatccgcctccatccagtctattaattgttgccgggaagctagagtaagtagttcgccagttaatagtttgcgcaacgttgttgccattgctacaggcatcgtggtgtcacgctcgtcgtttggtatggcttcattcagctccggttcccaacgatcaaggcgagttacatgatcccccatgttgtgcaaaaaagcggttagctccttcggtcctccgatcgttgtcagaagtaagttggccgcagtgttatcactcatggttatggcagcactgcataattctcttactgtcatgccatccgtaagatgcttttctgtgactggtgagtactcaaccaagtcattctgagaatagtgtatgcggcgaccgagttgctcttgcccggcgtcaatacgggataataccgcgccacatagcagaactttaaaagtgctcatcattggaaaacgttcttcggggcgaaaactctcaaggatcttaccgctgttgagatccagttcgatgtaacccactcgtgcacccaactgatcttcagcatcttttactttcaccagcgtttctgggtgagcaaaaacaggaaggcaaaatgccgcaaaaaagggaataagggcgacacggaaatgttgaatactcatactcttcctttttcaatattattgaagcatttatcagggttattgtctcatgagcggatacatatttgaatgtatttagaaaaataaacaaataggggttccgcgcacatttccccgaaaagtgccacctgatgcggtgtgaaataccgcacagatgcgtaaggagaaaataccgcatcaggaaattgtaagcgttaatattttgttaaaattcgcgttaaatttttgttaaatcagctcattttttaaccaataggccgaaatcggcaaaatcccttataaatcaaaagaatagaccgagatagggttgagtgttgttccagtttggaacaagagtccactattaaagaacgtggactccaacgtcaaagggcgaaaaaccgtctatcagggcgatggcccactacgtgaaccatcaccctaatcaagttttttggggtcgaggtgccgtaaagcactaaatcggaaccctaaagggagcccccgatttagagcttgacggggaaagccggcgaacgtggcgagaaaggaagggaagaaagcgaaaggagcgggcgctagggcgctggcaagtgtagcggtcacgctgcgcgtaaccaccacacccgccgcgcttaatgcgccgctacagggcgcgtccattcgccattcaggctgcgcaactgttgggaagggcgatcggtgcgggcctcttcgctattacgccagctggcgaaagggggatgtgctgcaaggcgattaagttgggtaacgccagggttttcccagtcacgacgttgtaaaacgacggccagtgaattgtaatacgactcactatagggcgaattgggcccgacgtcgcatgcatcaaaggaagggtgaatccaaggaagttcttgacaaactgctggaatcggtacagcttggacgacttgtcgttgctaacctggtcatagaggtcgttctcaccaaaggccatgatgggaacaagggcgacatttccgacctccataccaagtcgaacaaaaccctttcgcttgagtagcaccaggtccatgacaccgggtctggccagaagactttcctgtgctccaccaacgacaatgcagatagactggtttcgcttgaggagggccttgcaggacttcttggagacagaagcgactcccagactcatgaggtactctctgtagagaggcactcggaagttgttggtgagagtcataagagaaacagggatgcccggaaagagcttggaccatccagctccctcggtggcaattccaccaaaggctcccatgccgataatgccgtgggggtggtagccgaagatgtattttctgccagtgggcttgagttttgtgggcgacagctgtgggtcgttttcgccaatgatctggttggcgtaggagttgagggacccgttaagaagcgtggaatcagatgcagtggagccagcagaggcggacgacaaaggtcgtcggttagtggtgccattgttgccgttgccgttaagttcggagcccgaggcgtggccgttggagccagatgattctccacggctatatctgctgtcgtggttaattaactcacctgcaggattgagactatgaatggattcccgtgcccgtattactctactaatttgatcttggaacgcgaaaatacgtttctaggactccaaagaatctcaactcttgtccttactaaatatactacccatagttgatggtttacttgaacagagaggacatgttcacttgacccaaagtttctcgcatctcttggatatttgaacaacggcgtccactgaccgtcagttatccagtcacaaaacccccacattcatacattcccatgtacgtttacaaagttctcaattccatcgtgcaaatcaaaatcacatctattcattcatcatatataaacccatcatgtctactaacactcacaactccatagaaaacatcgactcagaacacacgctccatgcggccgcttaggaatcctgagcgtccttgacacagtgaaccacaccgactttgtgcatgtacttgagggtggaaatgatgttgcccacaatggtagggtagaagacgtaccgaactccgtgtcgttcgcaacactctcggacagcttgctgcacgaagggatagtgccaagacgacattcgaggaaagaggtgatgctcgatctggaagttgagaccgccagtaaagaacatggcaatgggtccaccgtaggtggaagaggtctccacctgagctctgtaccagtcgatctgatcggcttcaacgtccttctcggagctcttgaccttgcagttcttgtcggggattcgctccgagccatcgaagttgtgagacaagatgaaaaagaaggtgaggaaggcaccggtagcagtgggcaccagaggaatggtgatgagcagggaggttccagtgagataccagggcaagaaggcggttcgaaagatgaagaaagctcgcataacgaatgcaagggttcggtaccgtcgcagaaagccgttctctcgcatggctgtgacagactcgggaatggtgtcgttgtgctgcattcggaagatgtagagagggttgtacaccagcgaaacgccgtaggctccaagcacgaggtacatgtaccaggcctggaatcggtgaaaccactttcgagcagtgttggcagcagggtagttgtggaacacaaggaatggttctgcggactcggcatccaggtcgagaccatgctgattggtgtaggtgtgatgtcgcatgatgtgagactgcagccagatccatctggacgatccaatgacgtcgatgccgtaggcaaagagagcgttgacccagggctttttgctgatggcaccatgagaggcatcgtgctgaatggacaggccgatctgcatgtgcatgaatccagtcaagagaccccacagcaccattccggtagtagcccagtgccactcgcaaaaggcggtgacagcaatgatgccaacggttcgcagccagaatccaggtgtggcataccagttccgacctttcatgacctctcgcatagttcgcttgacgtcctgtgcaaagggagagtcgtaggtgtagacaatgtccttggaggttcggtcgtgcttgcctcgcacgaactgttgaagcagcttcgagttctcgggcttgacgtaagggtgcatggagtagaacagaggagaagcatcggaggcaccagaagcgaggatcaagtcgcctccgggatggaccttggcaagaccttccagatcgtagagaatgccgtcgatggcaaccaggtcgggtcgctcgagcagctgctcggtagtaagggagagagccatggccattgctgtagatatgtcttgtgtgtaagggggttggggtggttgtttgtgttcttgacttttgtgttagcaagggaagacgggcaaaaaagtgagtgtggttgggagggagagacgagccttatatataatgcttgtttgtgtttgtgcaagtggacgccgaaacgggcaggagccaaactaaacaaggcagacaatgcgagcttaattggattgcctgatgggcaggggttagggctcgatcaatgggggtgcgaagtgacaaaattgggaattaggttcgcaagcaaggctgacaagactttggcccaaacatttgtacgcggtggacaacaggagccacccatcgtctgtcacgggctagccggtcgtgcgtcctgtcaggctccacctaggctccatgccactccatacaatcccactagtgtaccgctaggccgcttttagctcccatctaagacccccccaaaacctccactgtacagtgcactgtactgtgtggcgatcaagggcaagggaaaaaaggcgcaaacatgcacgcatggaatgacgtaggtaaggcgttactagactgaaaagtggcacatttcggcgtgccaaagggtcctaggtgcgtttcgcgagctgggcgccaggccaagccgctccaaaacgcctctccgactccctccagcggcctccatatccccatccctctccacagcaatgttgttaagccttgcaaacgaaaaaatagaaaggctaataagcttccaatattgtggtgtacgctgcataacgcaacaatgagcgccaaacaacacacacacacagcacacagcagcattaaccacgatgaacagcatgaattctctctcttgagcttttccataacaagttcttctgcctccaggaagtccatgggtggtttgatcatggttttggtgtagtggtagtgcagtggtggtattgtgactggggatgtagttgagaataagtcatacacaagtcagctttcttcgagcctcatataagtataagtagttcaacgtattagcactgtacccagcatctccgtatcgagaaacacaacaacatgccccattggacagatcatgcggatacacaggttgtgcagtatcatacatactcgatcagacaggtcgtctgaccatcatacaagctgaacaagcgctccatacttgcacgctctctatatacacagttaaattacatatccatagtctaacctctaacagttaatcttctggtaagcctcccagccagccttctggtatcgcttggcctcctcaataggatctcggttctggccgtacagacctcggccgacaattatgatatccgttccggtagacatgacatcctcaacagttcggtactgctgtccgagagcgtctcccttgtcgtcaagacccaccccgggggtcagaataagccagtcctcagagtcgcccttaggtcggttctgggcaatgaagccaaccacaaactcggggtcggatcgggcaagctcaatggtctgcttggagtactcgccagtggccagagagcccttgcaagacagctcggccagcatgagcagacctctggccagcttctcgttgggagaggggactaggaactccttgtactgggagttctcgtagtcagagacgtcctccttcttctgttcagagacagtttcctcggcaccagctcgcaggccagcaatgattccggttccgggtacaccgtgggcgttggtgatatcggaccactcggcgattcggtgacaccggtactggtgcttgacagtgttgccaatatctgcgaactttctgtcctcgaacaggaagaaaccgtgcttaagagcaagttccttgagggggagcacagtgccggcgtaggtgaagtcgtcaatgatgtcgatatgggttttgatcatgcacacataaggtccgaccttatcggcaagctcaatgagctccttggtggtggtaacatccagagaagcacacaggttggttttcttggctgccacgagcttgagcactcgagcggcaaaggcggacttgtggacgttagctcgagcttcgtaggagggcattttggtggtgaagaggagactgaaataaatttagtctgcagaactttttatcggaaccttatctggggcagtgaagtatatgttatggtaatagttacgagttagttgaacttatagatagactggactatacggctatcggtccaaattagaaagaacgtcaatggctctctgggcgtcgcctttgccgacaaaaatgtgatcatgatgaaagccagcaatgacgttgcagctgatattgttgtcggccaaccgcgccgaaaacgcagctgtcagacccacagcctccaacgaagaatgtatcgtcaaagtgatccaagcacactcatagttggagtcgtactccaaaggcggcaatgacgagtcagacagatactcgtcgaccttttccttgggaaccaccaccgtcagcccttctgactcacgtattgtagccaccgacacaggcaacagtccgtggatagcagaatatgtcttgtcggtccatttctcaccaactttaggcgtcaagtgaatgttgcagaagaagtatgtgccttcattgagaatcggtgttgctgatttcaataaagtcttgagatcagtttggccagtcatgttgtggggggtaattggattgagttatcgcctacagtctgtacaggtatactcgctgcccactttatactttttgattccgctgcacttgaagcaatgtcgtttaccaaaagtgagaatgctccacagaacacaccccagggtatggttgagcaaaaaataaacactccgatacggggaatcgaaccccggtctccacggttctcaagaagtattcttgatgagagcgtatcgatagttggagcaagggagaaatgtagagtgtgaaagactcactatggtccgggcttatctcgaccaatagccaaagtctggagtttctgagagaaaaaggcaagatacgtatgtaacaaagcgacgcatggtacaataataccggaggcatgtatcatagagagttagtggttcgatgatggcactggtgcctggtatgactttatacggctgactacatatttgtcctcagacatacaattacagtcaagcacttacccttggacatctgtaggtaccccccggccaagacgatctcagcgtgtcgtatgtcggattggcgtagctccctcgctcgtcaattggctcccatctactttcttctgcttggctacacccagcatgtctgctatggctcgttttcgtgccttatctatcctcccagtattaccaactctaaatgacatgatgtgattgggtctacactttcatatcagagataaggagtagcacagttgcataaaaagcccaactctaatcagcttcttcctttcttgtaattagtacaaaggtgattagcgaaatctggaagcttagttggccctaaaaaaatcaaaaaaagcaaaaaacgaaaaacgaaaaaccacagttttgagaacagggaggtaacgaaggatcgtatatatatatatatatatatatacccacggatcccgagaccggcctttgattcttccctacaaccaaccattctcaccaccctaattcacaaccatggctgccgtcatcgaggtggccaacgagttcgtcgctatcactgccgagacccttcccaaggtggactatcagcgactctggcgagacatctactcctgcgagctcctgtacttctccattgctttcgtcatcctcaagtttacccttggcgagctctcggattctggcaaaaagattctgcgagtgctgttcaagtggtacaacctcttcatgtccgtcttttcgctggtgtccttcctctgtatgggttacgccatctacaccgttggactgtactccaacgaatgcgacagagctttcgacaacagcttgttccgatttgccaccaaggtcttctactattccaagtttctggagtacatcgactctttctaccttcccctcatggccaagcctctgtcctttctgcagttctttcatcacttgggagctcctatggacatgtggctcttcgtgcagtactctggcgaatccatttggatctttgtgttcctgaacggattcattcactttgtcatgtacggctactattggacacggctgatgaagttcaactttcccatgcccaagcagctcattaccgcaatgcagatcacccagttcaacgttggcttctacctcgtgtggtggtacaaggacattccctgttaccgaaaggatcccatgcgaatgctggcctggatcttcaactactggtacgtcggtaccgttcttctgctcttcatcaacttctttgtcaagtcctacgtgtttcccaagcctaagactgccgacaaaaaggtccagtagcggccgcatgtacatacaagattatttatagaaatgaatcgcgatcgaacaaagagtacgagtgtacgagtaggggatgatgataaaagtggaagaagttccgcatctttggatttatcaacgtgtaggacgatacttcctgtaaaaatgcaatgtctttaccataggttctgctgtagatgttattaactaccattaacatgtctacttgtacagttgcagaccagttggagtatagaatggtacacttaccaaaaagtgttgatggttgtaactacgatatataaaactgttgacgggatctgtatattcggtaagatatattttgtggggttttagtggtgtttaaacaccactaaaaccccacaaaatatatcttaccgaatatacagatctactatagaggaacaattgccccggagaagacggccaggccgcctagatgacaaattcaacaactcacagctgactttctgccattgccactaggggggggcctttttatatggccaagccaagctctccacgtcggttgggctgcacccaacaataaatgggtagggttgcaccaacaaagggatgggatggggggtagaagatacgaggataacggggctcaatggcacaaataagaacgaatactgccattaagactcgtgatccagcgactgacaccattgcatcatctaagggcctcaaaactacctcggaactgctgcgctgatctggacaccacagaggttccgagcactttaggttgcaccaaatgtcccaccaggtgcaggcagaaaacgctggaacagcgtgtacagtttgtcttaacaaaaagtgagggcgctgaggtcgagcagggtggtgtgacttgttatagcctttagagctgcgaaagcgcgtatggatttggctcatcaggccagattgagggtctgtggacacatgtcatgttagtgtacttcaatcgccccctggatatagccccgacaataggccgtggcctcatttttttgccttccgcacatttccattgctcggtacccacaccttgcttctcctgcacttgccaaccttaatactggtttacattgaccaacatcttacaagcggggggcttgtctagggtatatataaacagtggctctcccaatcggttgccagtctcttttttcctttctttccccacagattcgaaatctaaactacacatcacacaatgcctgttactgacgtccttaagcgaaagtccggtgtcatcgtcggcgacgatgtccgagccgtgagtatccacgacaagatcagtgtcgagacgacgcgttttgtgtaatgacacaatccgaaagtcgctagcaacacacactctctacacaaactaacccagctctccatggtgaaggcttctcgacaggctctgcccctcgtcatcgacggaaaggtgtacgacgtctccgcttgggtgaacttccaccctggtggagctgaaatcattgagaactaccagggacgagatgctactgacgccttcatggttatgcactctcaggaagccttcgacaagctcaagcgaatgcccaagatcaaccaggcttccgagctgcctccccaggctgccgtcaacgaagctcaggaggatttccgaaagctccgagaagagctgatcgccactggcatgtttgacgcctctcccctctggtactcgtacaagatcttgaccaccctgggtcttggcgtgcttgccttcttcatgctggtccagtaccacctgtacttcattggtgctctcgtgctcggtatgcactaccagcaaatgggatggctgtctcatgacatctgccaccaccagaccttcaagaaccgaaactggaataacgtcctgggtctggtctttggcaacggactccagggcttctccgtgacctggtggaaggacagacacaacgcccatcattctgctaccaacgttcagggtcacgatcccgacattgataacctgcctctgctcgcctggtccgaggacgatgtcactcgagcttctcccatctcccgaaagctcattcagttccaacagtactatttcctggtcatctgtattctcctgcgattcatctggtgtttccagtctgtgctgaccgttcgatccctcaaggaccgagacaaccagttctaccgatctcagtacaagaaagaggccattggactcgctctgcactggactctcaagaccctgttccacctcttctttatgccctccatcctgacctcgatgctggtgttctttgtttccgagctcgtcggtggcttcggaattgccatcgtggtcttcatgaaccactaccctctggagaagatcggtgattccgtctgggacggacatggcttctctgtgggtcagatccatgagaccatgaacattcgacgaggcatcattactgactggttctttggaggcctgaactaccagatcgagcaccatctctggcccaccctgcctcgacacaacctcactgccgtttcctaccaggtggaacagctgtgccagaagcacaacctcccctaccgaaaccctctgccccatgaaggtctcgtcatcctgctccgatacctgtcccagttcgctcgaatggccgagaagcagcccggtgccaaggctcagtaagcggccgcatgagaagataaatatataaatacattgagatattaaatgcgctagattagagagcctcatactgctcggagagaagccaagacgagtactcaaaggggattacaccatccatatccacagacacaagctggggaaaggttctatatacactttccggaataccgtagtttccgatgttatcaatgggggcagccaggatttcaggcacttcggtgtctcggggtgaaatggcgttcttggcctccatcaagtcgtaccatgtcttcatttgcctgtcaaagtaaaacagaagcagatgaagaatgaacttgaagtgaaggaatttaaatagttggagcaagggagaaatgtagagtgtgaaagactcactatggtccgggcttatctcgaccaatagccaaagtctggagtttctgagagaaaaaggcaagatacgtatgtaacaaagcgacgcatggtacaataataccggaggcatgtatcatagagagttagtggttcgatgatggcactggtgcctggtatgactttatacggctgactacatatttgtcctcagacatacaattacagtcaagcacttacccttggacatctgtaggtaccccccggccaagacgatctcagcgtgtcgtatgtcggattggcgtagctccctcgctcgtcaattggctcccatctactttcttctgcttggctacacccagcatgtctgctatggctcgttttcgtgccttatctatcctcccagtattaccaactctaaatgacatgatgtgattgggtctacactttcatatcagagataaggagtagcacagttgcataaaaagcccaactctaatcagcttcttcctttcttgtaattagtacaaaggtgattagcgaaatctggaagcttagttggccctaaaaaaatcaaaaaaagcaaaaaacgaaaaacgaaaaaccacagttttgagaacagggaggtaacgaaggatcgtatatatatatatatatatatatacccacggatcccgagaccggcctttgattcttccctacaaccaaccattctcaccaccctaattcacaaccatggcctccacctcggctctgcccaagcagaaccctgccctccgacgaaccgtcacttccaccactgtgaccgactcggagtctgctgccgtctctccctccgattctcccagacactcggcctcctctacatcgctgtcttccatgtccgaggtggacattgccaagcccaagtccgagtacggtgtcatgctggatacctacggcaaccagttcgaagttcccgacttcaccatcaaggacatctacaacgctattcccaagcactgcttcaagcgatctgctctcaagggatacggctacattcttcgagacattgtcctcctgactaccactttcagcatctggtacaactttgtgacacccgagtacattccctccactcctgctcgagccggtctgtgggctgtgtacaccgttcttcagggactcttcggtactggactgtgggtcattgcccacgagtgtggacatggtgctttctccgattcccgaatcatcaacgacattactggctgggtgcttcactcttccctgcttgttccctacttcagctggcaaatctcccaccggaagcatcacaaggccactggaaacatggagcgagacatggtcttcgttcctcgaacccgagagcagcaagctactcgactcggcaagatgacccacgaactcgcccatcttaccgaggaaactcctgctttcaccctgctcatgcttgtgcttcagcaactggtcggttggcccaactatctcattaccaacgttactggacacaactaccatgagcggcagcgagagggtcgaggcaagggaaagcacaacggtcttggcggtggagttaaccatttcgatccccgatctcctctgtacgagaacagcgacgccaagctcatcgtgctctccgacattggcattggtcttatggccaccgctctgtactttctcgttcagaagttcggattctacaacatggccatctggtacttcgttccctacttgtgggttaaccactggctcgtcgccattacctttctgcagcacacagatcctactcttccccactacaccaacgacgagtggaactttgtgcgaggtgccgctgcaaccatcgaccgagagatgggcttcattggacgtcatctgctccacggcattatcgagactcacgtcctgcatcactacgtctcttccattcccttctacaatgcggacgaagctaccgaggccatcaaacctatcatgggcaagcactatcgagctgatgtccaggacggtcctcgaggattcattcgagccatgtaccgatctgcacgaatgtgccagtgggttgaaccctccgctggtgccgagggagctggcaagggtgtcctgttctttcgaaaccgaaacaatgtgggcactcctcccgctgtcatcaagcccgttgcctaagcggccgctatttatcactctttacaacttctacctcaactatctactttaataaatgaatatcgtttattctctatgattactgtatatgcgttcctctaagacaaatcgaaaccagcatgtgatcgaatggcatacaaaagtttcttccgaagttgatcaatgtcctgatagtcaggcagcttgagaagattgacacaggtggaggccgtagggaaccgatcaacctgtctaccagcgttacgaatggcaaatgacgggttcaaagccttgaatccttgcaatggtgccttggatactgatgtcacaaacttaagaagcagccgcttgtcctcttcctcgatcgatggtcatagctgtttcctgtgtgaaattgttatccgctcacaattccacacaac

SEQ ID NO: 236 - DNA, 2119 bp, Yarrowia lipolytica
  CDS (291)..(1835): DGAT2 opening reading frame, comprising 2 smaller internal opening reading frames
  misc_feature (291)..(293): initiation codon ('ATG')
  misc_feature (456)..(458): initiation codon ('ATG')
  misc_feature (768)..(770): initiation codon ('ATG')
  ref <302>: TITLE: ACYLTRANSFERASES FOR ALTERATION OF POLYUNSATURATED FATTY ACIDS AND OIL CONTENT IN OLEAGINOUS YEASTS
  ref <310>: PATENT DOCUMENT NUMBER: U.S. Patent 7,267,976
  ref <311>: PATENT FILING DATE: 2004-07-01
  ref <312>: PUBLICATION DATE: 2007-09-11
  ref <313>: RELEVANT RESIDUES IN SEQ ID NO: (1)..(2119)
aaacgcacccactgctcgtcctccttgctcctcgaaaccgactcctctacacacgtcaaatccgaggttgaaatcttccccacatttggcagccaaaccagcacatcccagcaacctcgcacagcgccgaaatcgacctgtcgacttggccacaaaaaaaagcaccggctctgcaacagttctcacgaccaattacgtacaagtacgaaatcgttcgtggaccgtgactgataagctcccactttttcttctaacaacaggcaacagacaagtcacacaaaacaaaagctatgactatcgactcacaatactacaagtcgcgagacaaaaacgacacggcacccaaaatcgcgggaatccgatatgccccgctatcgacaccattactcaaccgatgtgagaccttctctctggtctggcacattttcagcattcccactttcctcacaattttcatgctatgctgcgcaattccactgctctggccatttgtgattgcgtatgtagtgtacgctgttaaagacgactccccgtccaacggaggagtggtcaagcgatactcgcctatttcaagaaacttcttcatctggaagctctttggccgctacttccccataactctgcacaagacggtggatctggagcccacgcacacatactaccctctggacgtccaggagtatcacctgattgctgagagatactggccgcagaacaagtacctccgagcaatcatctccaccatcgagtactttctgcccgccttcatgaaacggtctctttctatcaacgagcaggagcagcctgccgagcgagatcctctcctgtctcccgtttctcccagctctccgggttctcaacctgacaagtggattaaccacgacagcagatatagccgtggagaatcatctggctccaacggccacgcctcgggctccgaacttaacggcaacggcaacaatggcaccactaaccgacgacctttgtcgtccgcctctgctggctccactgcatctgattccacgcttcttaacgggtccctcaactcctacgccaaccagatcattggcgaaaacgacccacagctgtcgcccacaaaactcaagcccactggcagaaaatacatcttcggctaccacccccacggcattatcggcatgggagcctttggtggaattgccaccgagggagctggatggtccaagctctttccgggcatccctgtttctcttatgactctcaccaacaacttccgagtgcctctctacagagagtacctcatgagtctgggagtcgcttctgtctccaagaagtcctgcaaggccctcctcaagcgaaaccagtctatctgcattgtcgttggtggagcacaggaaagtcttctggccagacccggtgtcatggacctggtgctactcaagcgaaagggttttgttcgacttggtatggaggtcggaaatgtcgcccttgttcccatcatggcctttggtgagaacgacctctatgaccaggttagcaacgacaagtcgtccaagctgtaccgattccagcagtttgtcaagaacttccttggattcacccttcctttgatgcatgcccgaggcgtcttcaactacgatgtcggtcttgtcccctacaggcgacccgtcaacattgtggttggttcccccattgacttgccttatctcccacaccccaccgacgaagaagtgtccgaataccacgaccgatacatcgccgagctgcagcgaatctacaacgagcacaaggatgaatatttcatcgattggaccgaggagggcaaaggagccccagagttccgaatgattgagtaaggaaaactgcctgggttaggcaaatagctaatgagtatttttttgatggcaaccaaatgtagaaagaaaaaaaaaaaaaaagaaaaaaaaaagagaatattatatctatgtaattctattaaaagctctgttgagtgagcggaataaatactgttgaagaggggattgtgtagagatctgtttactcaatggcaaactcatctgggggagatccttccactgtgggaagctcctggatagcctttgcatcggggttcaagaagaccattgtgaacagcccttga

SEQ ID NO: 237 - protein, 514 aa, Yarrowia lipolytica
MTIDSQYYKSRDKNDTAPKIAGIRYAPLSTPLLNRCETFSLVWHIFSIPTFLTIFMLCCAIPLLWPFVIAYVVYAVKDDSPSNGGVVKRYSPISRNFFIWKLFGRYFPITLHKTVDLEPTHTYYPLDVQEYHLIAERYWPQNKYLRAIISTIEYFLPAFMKRSLSINEQEQPAERDPLLSPVSPSSPGSQPDKWINHDSRYSRGESSGSNGHASGSELNGNGNNGTTNRRPLSSASAGSTASDSTLLNGSLNSYANQIIGENDPQLSPTKLKPTGRKYIFGYHPHGIIGMGAFGGIATEGAGWSKLFPGIPVSLMTLTNNFRVPLYREYLMSLGVASVSKKSCKALLKRNQSICIVVGGAQESLLARPGVMDLVLLKRKGFVRLGMEVGNVALVPIMAFGENDLYDQVSNDKSSKLYRFQQFVKNFLGFTLPLMHARGVFNYDVGLVPYRRPVNIVVGSPIDLPYLPHPTDEEVSEYHDRYIAELQRIYNEHKDEYFIDWTEEGKGAPEFRMIE

SEQ ID NO: 238 - DNA, 792 bp, Eutreptiella sp. CCMP389
  CDS (1)..(792): synthetic delta-9 elongase (codon-optimized for Yarrowia lipolytica)
  ref <302>: TITLE: DELTA-9 ELONGASES AND THEIR USE IN MAKING POLYUNSATURATED FATTY ACIDS
  ref <310>: PATENT DOCUMENT NUMBER: WO 2007/061742
  ref <311>: PATENT FILING DATE: 2006-11-16
  ref <312>: PUBLICATION DATE: 2007-05-31
  ref <313>: RELEVANT RESIDUES IN SEQ ID NO: (1)..(792)
  ref <302>: TITLE: DELTA-9 ELONGASES AND THEIR USE IN MAKING POLYUNSATURATED FATTY ACIDS
  ref <310>: PATENT DOCUMENT NUMBER: US 2007-0117190-A1
  ref <311>: PATENT FILING DATE: 2006-11-16
  ref <312>: PUBLICATION DATE: 2007-05-24
  ref <313>: RELEVANT RESIDUES IN SEQ ID NO: (1)..(792)
atggctgccgtcatcgaggtggccaacgagttcgtcgctatcactgccgagacccttcccaaggtggactatcagcgactctggcgagacatctactcctgcgagctcctgtacttctccattgctttcgtcatcctcaagtttacccttggcgagctctcggattctggcaaaaagattctgcgagtgctgttcaagtggtacaacctcttcatgtccgtcttttcgctggtgtccttcctctgtatgggttacgccatctacaccgttggactgtactccaacgaatgcgacagagctttcgacaacagcttgttccgatttgccaccaaggtcttctactattccaagtttctggagtacatcgactctttctaccttcccctcatggccaagcctctgtcctttctgcagttctttcatcacttgggagctcctatggacatgtggctcttcgtgcagtactctggcgaatccatttggatctttgtgttcctgaacggattcattcactttgtcatgtacggctactattggacacggctgatgaagttcaactttcccatgcccaagcagctcattaccgcaatgcagatcacccagttcaacgttggcttctacctcgtgtggtggtacaaggacattccctgttaccgaaaggatcccatgcgaatgctggcctggatcttcaactactggtacgtcggtaccgttcttctgctcttcatcaacttctttgtcaagtcctacgtgtttcccaagcctaagactgccgacaaaaaggtccagtag

SEQ ID NO: 239 - protein, 263 aa, Eutreptiella sp. CCMP389
MAAVIEVANEFVAITAETLPKVDYQRLWRDIYSCELLYFSIAFVILKFTLGELSDSGKKILRVLFKWYNLFMSVFSLVSFLCMGYAIYTVGLYSNECDRAFDNSLFRFATKVFYYSKFLEYIDSFYLPLMAKPLSFLQFFHHLGAPMDMWLFVQYSGESIWIFVFLNGFIHFVMYGYYWTRLMKFNFPMPKQLITAMQITQFNVGFYLVWWYKDIPCYRKDPMRMLAWIFNYWYVGTVLLLFINFFVKSYVFPKPKTADKKVQ

SEQ ID NO: 240 - DNA, 7334 bp, Artificial Sequence
  Plasmid pYPS161-ACBP
taagcgagattatgagttgcaagtaagtagttgatccagtattaattgatctctgatttgaccgaggatgaggggatgccacatacaaatatttctgccagttcatcattcttagcatagtagaatatgtagcgctagtacatatatagtgagtatgcacagccatggtggcaaatggaccagataagacggcatgtaacagtgatgaataatcgaatatgagacaatctgcttagacaatcggtcggtgtacaaaacagttaacaacaaacacatcctgctcaccctggagattctctttttcccttacttttcgtgtctgaccgatttgatctgatctactctaacttagtatcagtggagtgcgtcaccatcaccacaccaacctacgcgtgccacacgacactcgactccccgaaatgcagtgccgcaaatgctgctttgcatgcgacgtcgggcccaattcgccctatagtgagtcgtattacaattcactggccgtcgttttacaacgtcgtgactgggaaaaccctggcgttacccaacttaatcgccttgcagcacatccccctttcgccagctggcgtaatagcgaagaggcccgcaccgatcgcccttcccaacagttgcgcagcctgaatggcgaatggacgcgccctgtagcggcgcattaagcgcggcgggtgtggtggttacgcgcagcgtgaccgctacacttgccagcgccctagcgcccgctcctttcgctttcttcccttcctttctcgccacgttcgccggctttccccgtcaagctctaaatcgggggctccctttagggttccgatttagtgctttacggcacctcgaccccaaaaaacttgattagggtgatggttcacgtagtgggccatcgccctgatagacggtttttcgccctttgacgttggagtccacgttctttaatagtggactcttgttccaaactggaacaacactcaaccctatctcggtctattcttttgatttataagggattttgccgatttcggcctattggttaaaaaatgagctgatttaacaaaaatttaacgcgaattttaacaaaatattaacgcttacaatttcctgatgcggtattttctccttacgcatctgtgcggtatttcacaccgcatcaggtggcacttttcggggaaatgtgcgcggaacccctatttgtttatttttctaaatacattcaaatatgtatccgctcatgagacaataaccctgataaatgcttcaataatattgaaaaaggaagagtatgagtattcaacatttccgtgtcgcccttattcccttttttgcggcattttgccttcctgtttttgctcacccagaaacgctggtgaaagtaaaagatgctgaagatcagttgggtgcacgagtgggttacatcgaactggatctcaacagcggtaagatccttgagagttttcgccccgaagaacgttttccaatgatgagcacttttaaagttctgctatgtggcgcggtattatcccgtattgacgccgggcaagagcaactcggtcgccgcatacactattctcagaatgacttggttgagtactcaccagtcacagaaaagcatcttacggatggcatgacagtaagagaattatgcagtgctgccataaccatgagtgataacactgcggccaacttacttctgacaacgatcggaggaccgaaggagctaaccgcttttttgcacaacatgggggatcatgtaactcgccttgatcgttgggaaccggagctgaatgaagccataccaaacgacgagcgtgacaccacgatgcctgtagcaatggcaacaacgttgcgcaaactattaactggcgaactacttactctagcttcccggcaacaattaatagactggatggaggcggataaagttgcaggaccacttctgcgctcggcccttccggctggctggtttattgctgataaatctggagccggtgagcgtgggtctcgcggtatcattgcagcactggggccagatggtaagccctcccgtatcgtagttatctacacgacggggagtcaggcaactatggatgaacgaaatagacagatcgctgagataggtgcctcactgattaagcattggtaactgtcagaccaagtttactcatatatactttagattgatttaaaacttcatttttaatttaaaaggatctaggtgaagatcctttttgataatctcatgaccaaaatcccttaacgtgagttttcgttccactgagcgtcagaccccgtagaaaagatcaaaggatcttcttgagatcctttttttctgcgcgtaatctgctgcttgcaaacaaaaaaaccaccgctaccagcggtggtttgtttgccggatcaagagctaccaactctttttccgaaggtaactggcttcagcagagcgcagataccaaatactgttcttctagtgtagccgtagttaggccaccacttcaagaactctgtagcaccgcctacatacctcgctctgctaatcctgttaccagtggctgctgccagtggcgataagtcgtgtcttaccgggttggactcaagacgatagttaccggataaggcgcagcggtcgggctgaacggggggttcgtgcacacagcccagcttggagcgaacgacctacaccgaactgagatacctacagcgtgagctatgagaaagcgccacgcttcccgaagggagaaaggcggacaggtatccggtaagcggcagggtcggaacaggagagcgcacgagggagcttccagggggaaacgcctggtatctttatagtcctgtcgggtttcgccacctctgacttgagcgtcgatttttgtgatgctcgtcaggggggcggagcctatggaaaaacgccagcaacgcggcctttttacggttcctggccttttgctggccttttgctcacatgttctttcctgcgttatcccctgattctgtggataaccgtattaccgcctttgagtgagctgataccgctcgccgcagccgaacgaccgagcgcagcgagtcagtgagcgaggaagcggaagagcgcccaatacgcaaaccgcctctccccgcgcgttggccgattcattaatgcagctggcgcgcccatactgtacttgtacttgtaccggccttggtccaccggaacgcactccgcttaacgccgcttggcgtccctgcctgtctctgcatcaaaacatcaggtagcagcacatgtctgtgcgggtacttgtacgtccatacagacaaccacagcggcttttcagcgtctatgcactcacacctaatgccttttcaaccttcttcaacttacgagctccacagtaaatgttgtaccacgtctgttttgccggcaaactgggtgtgggcttgggggagaattttcatggacgaaaacagggtcgtattggggatattggtggctgtcggtgtggtcagttaagggatctggtggtgtgtgatgtttattttggctgtttatagcgacagtttggactgtatatatagaataagtatggtaggtataagatagactggtggcctcgaaaatgaacgaacgcacaagatgaaataaaataaaatacaagtacttgtacaagtacaagcacgtacttaccaagtaccaccgaccacccaaatgaacaccccatagtcacataaatttctcctgttcagcttttagttgtccactcgcctcctgcataccatctccccttactccacgaacatcaccaagtacgtactggtacactgaaacttccaatgtggtggggagaaacggcactggtgagactcccgccttttgcctttgtcggcgtgacaaagagctgacactagtcgagggttatgtcatgttgaccttgacctttgacctggtctttgtttgaccttgcttgatcttgacgttcagacctcttcgatatggcttagtaatgatgaccacaggtagcaaagtcgagcaaaatgccagtaacggcgataagtgagagcaaaagtgccattactcgtgtaatatgctgactaagaccatatcgccccaaccggtcctaagtgatacccaacgatatcaggcctgcgcatcctacatgtaagataatggcgattatattgtagatcaacctgttgagacgcagcacgccgctcacgccgctcacgctagcgtattgaaagaaccgccaactttacgtaattggtttttctgccaaatagcattttcttgcttcctcttcatcatcattgctactgtaccacttgttccaaggtcctacccgcacaactatcatcatcttgattgctgctccgagtaatgcatagacctcaggcaccatcagttcacttgtataataatggtcatatggtgccattcatcaaagcgtaatggaagtatatcagcatcgataatgaactgaggccgaataccgaggtgtaataaccacagttcttctccagaagttccacattttttattttaatatgaacagcatcgtcattaaactatatactggagctctactctcgtgttgttccttggttgactatctagttagaagtatgtacgtatttagtttgaggtcaagagtccaaccacagcatgtacgtactcctacaagttgcagtacaatctgtaaactaaatccaacaacaatcaataccgaacaacaacaacaacaacaatcgtacgttgtgtggaagcttgtgagcggataacaatttcacacaggaaacagctatgaccatgattacgccaagctcgaaattaaccctcactaaagggaacaaaagctggagctccaccgcggacacaatatctggtcaaatttcagtttcgttacatttaaacggtaggttagtgcttggtatatgagttgtaggcatgacaatttggaaaggggtggactttgggaatattgtgggatttcaataccttagtttgtacagggtaattgttacaaatgatacaaagaactgtatttcttttcatttgttttaattggttgtatatcaagtccgttagacgagctcagtgccttggcttttggcactgtatttcatttttagaggtacactacattcagtgaggtatggtaaggttgagggcataatgaaggcaccttgtactgacagtcacagacctctcaccgagaattttatgagatatactcgggttcattttaggctcatcgatacgctctcatcaagaatacttcttgagaaccgtggagaccggggttcgattccccgtatcggagtgtttattttttgctcaaccataccctggggtgtgttctgtggagcattctcacttttggtaaacgacattgcttcaagtgcagcggaatcaaaaagtataaagtgggcagcgagtatacctgtacagactgtaggcgataactcaatccaattaccccccacaacatgactggccaaactgatctcaagactttattgaaatcagcaacaccgattctcaatgaaggcacatacttcttctgcaacattcacttgacgcctaaagttggtgagaaatggaccgacaagacatattctgctatccacggactgttgcctgtgtcggtggctacaatacgtgagtcagaagggctgacggtggtggttcccaaggaaaaggtcgacgagtatctgtctgactcgtcattgccgcctttggagtacgactccaactatgagtgtgcttggatcactttgacgatacattcttcgttggaggctgtgggtctgacagctgcgttttcggcgcggttggccgacaacaatatcagctgcaacgtcattgctggctttcatcatgatcacatttttgtcggcaaaggcgacgcccagagagccattgacgttctttctaatttggaccgatagccgtatagtccagtctatctataagttcaactaactcgtaactattaccataacatatacttcactgccccagataaggttccgataaaaagttctgcagactaaatttatttcagtctcctcttcaccaccaaaatgccctcctacgaagctcgagctaacgtccacaagtccgcctttgccgctcgagtgctcaagctcgtggcagccaagaaaaccaacctgtgtgcttctctggatgttaccaccaccaaggagctcattgagcttgccgataaggtcggaccttatgtgtgcatgatcaaaacccatatcgacatcattgacgacttcacctacgccggcactgtgctccccctcaaggaacttgctcttaagcacggtttcttcctgttcgaggacagaaagttcgcagatattggcaacactgtcaagcaccagtaccggtgtcaccgaatcgccgagtggtccgatatcaccaacgcccacggtgtacccggaaccggaatcattgctggcctgcgagctggtgccgaggaaactgtctctgaacagaagaaggaggacgtctctgactacgagaactcccagtacaaggagttcctagtcccctctcccaacgagaagctggccagaggtctgctcatgctggccgagctgtcttgcaagggctctctggccactggcgagtactccaagcagaccattgagcttgcccgatccgaccccgagtttgtggttggcttcattgcccagaaccgacctaagggcgactctgaggactggcttattctgacccccggggtgggtcttgacgacaagggagacgctctcggacagcagtaccgaactgttgaggatgtcatgtctaccggaacggatatcataattgtcggccgaggtctgtacggccagaaccgagatcctattgaggaggccaagcgataccagaaggctggctgggaggcttaccagaagattaactgttagaggttagactatggatatgtaatttaactgtgtatatagagagcgtgcaagtatggagcgcttgttcagcttgtatgatggtcagacgacctgtctgatcgagtatgtatgatactgcacaacctgtgtatccgcatgatctgtccaatggggcatgttgttgtgtttctcgatacggagatgctgggtacagtgctaatacgttgaactacttatacttatatgaggctcgaagaaagctgacttgtgtatgacttattctcaactacatccccagtcacaataccaccactgcactaccactacaccaaaaccatgatcaaaccacccatggacttcctggaggcagaagaacttgttatggaaaagctcaagagagagaattcaagatactatcaagacatgtgtcgcaacttaat

SEQ ID NO: 241 - DNA, 7966 bp, Artificial Sequence
  Plasmid pYPS161
aaatgtaacgaaactgaaatttgaccagatattgtgtccgcggtggagctccagcttttgttccctttagtgagggttaatttcgagcttggcgtaatcatggtcatagctgtttcctgtgtgaaattgttatccgctcacaagcttccacacaacgtacgttctggttggctcggatgatttctgcggccccagcgtaaggcaggcgttccgtccggatcggtttgggtcggatcggctttttgattgtcgtattgtcgctcatgttggacctggtgtgtagttgtagtgtcagatcagattcaccagcgaatgcatgtgaacttccccacattttgagccgaggcagatttgggttgcttagtaagcagacgtggcgttgcaagtagatgtggcaaatggggacgaagattccgaggggatatcatagttccaaggggatgtcatcatttgccagctttcgccgccacttttgacgagtttttgtgggtcaaataagtttagttgaacttttcaaatttcagttggcattttgttaatagaaagggtgccggtgctggggggttcattcctcgggttgcagatatcctatctgtcttaggggtatctctttcaatcgacaagatgtagttgggtaacaattatttattaatattctctccatccagtacagtactaacatcttgacatctcagcacaagtgcatcttcccaagtgtttgttggagaggttgttgggtattacttaggaaacagaacacagtacgtggagatcttggatacatcgtacatggaggttatccataaaaaagaccctccaggactagttacaatgccgttagatgaggaaatccacaaccctgattcactatgaacatattatcttcccccaaacttgcgatatatggcccttgatgatagccttgattttacccttgatggtacctccacgaccaaccgatctgctgtttgaagagatattttcaaatttgaagtgctcagatctactaaacatgagtccagtaattctttccgtctttccgatttccgatattcccttttttagcccgacttttcactgctcccatgtcaaacgattaggacttgggagacaatcccactgtcaaaatcaccccgatattctctgtaaaacaagtacttcttccacgtgatcttcaaatacctcttccacgtgaccttcaaatacctcttcaagtacctcttccacgcgaccttcaaagtcccttcaaatacccttctcaattctccccttctcctccatagtccttctctctgactaagcttgagaatacatgacgctaagacgaaaacacactagagaccctgagagcctgaacatgcatccactctgcagttgcgcacgtgcctacagcaactatcgggtccagtgctggatctgacactgcgtctccctatgaagaaactgataaacagatctgcactcataacaatgatctgagcgatgaaaacgtgacctccacagccacaagtcataatcggcgcgccagctgcattaatgaatcggccaacgcgcggggagaggcggtttgcgtattgggcgctcttccgcttcctcgctcactgactcgctgcgctcggtcgttcggctgcggcgagcggtatcagctcactcaaaggcggtaatacggttatccacagaatcaggggataacgcaggaaagaacatgtgagcaaaaggccagcaaaaggccaggaaccgtaaaaaggccgcgttgctggcgtttttccataggctccgcccccctgacgagcatcacaaaaatcgacgctcaagtcagaggtggcgaaacccgacaggactataaagataccaggcgtttccccctggaagctccctcgtgcgctctcctgttccgaccctgccgcttaccggatacctgtccgcctttctcccttcgggaagcgtggcgctttctcatagctcacgctgtaggtatctcagttcggtgtaggtcgttcgctccaagctgggctgtgtgcacgaaccccccgttcagcccgaccgctgcgccttatccggtaactatcgtcttgagtccaacccggtaagacacgacttatcgccactggcagcagccactggtaacaggattagcagagcgaggtatgtaggcggtgctacagagttcttgaagtggtggcctaactacggctacactagaagaacagtatttggtatctgcgctctgctgaagccagttaccttcggaaaaagagttggtagctcttgatccggcaaacaaaccaccgctggtagcggtggtttttttgtttgcaagcagcagattacgcgcagaaaaaaaggatctcaagaagatcctttgatcttttctacggggtctgacgctcagtggaacgaaaactcacgttaagggattttggtcatgagattatcaaaaaggatcttcacctagatccttttaaattaaaaatgaagttttaaatcaatctaaagtatatatgagtaaacttggtctgacagttaccaatgcttaatcagtgaggcacctatctcagcgatctgtctatttcgttcatccatagttgcctgactccccgtcgtgtagataactacgatacgggagggcttaccatctggccccagtgctgcaatgataccgcgagacccacgctcaccggctccagatttatcagcaataaaccagccagccggaagggccgagcgcagaagtggtcctgcaactttatccgcctccatccagtctattaattgttgccgggaagctagagtaagtagttcgccagttaatagtttgcgcaacgttgttgccattgctacaggcatcgtggtgtcacgctcgtcgtttggtatggcttcattcagctccggttcccaacgatcaaggcgagttacatgatcccccatgttgtgcaaaaaagcggttagctccttcggtcctccgatcgttgtcagaagtaagttggccgcagtgttatcactcatggttatggcagcactgcataattctcttactgtcatgccatccgtaagatgcttttctgtgactggtgagtactcaaccaagtcattctgagaatagtgtatgcggcgaccgagttgctcttgcccggcgtcaatacgggataataccgcgccacatagcagaactttaaaagtgctcatcattggaaaacgttcttcggggcgaaaactctcaaggatcttaccgctgttgagatccagttcgatgtaacccactcgtgcacccaactgatcttcagcatcttttactttcaccagcgtttctgggtgagcaaaaacaggaaggcaaaatgccgcaaaaaagggaataagggcgacacggaaatgttgaatactcatactcttcctttttcaatattattgaagcatttatcagggttattgtctcatgagcggatacatatttgaatgtatttagaaaaataaacaaataggggttccgcgcacatttccccgaaaagtgccacctgatgcggtgtgaaataccgcacagatgcgtaaggagaaaataccgcatcaggaaattgtaagcgttaatattttgttaaaattcgcgttaaatttttgttaaatcagctcattttttaaccaataggccgaaatcggcaaaatcccttataaatcaaaagaatagaccgagatagggttgagtgttgttccagtttggaacaagagtccactattaaagaacgtggactccaacgtcaaagggcgaaaaaccgtctatcagggcgatggcccactacgtgaaccatcaccctaatcaagttttttggggtcgaggtgccgtaaagcactaaatcggaaccctaaagggagcccccgatttagagcttgacggggaaagccggcgaacgtggcgagaaaggaagggaagaaagcgaaaggagcgggcgctagggcgctggcaagtgtagcggtcacgctgcgcgtaaccaccacacccgccgcgcttaatgcgccgctacagggcgcgtccattcgccattcaggctgcgcaactgttgggaagggcgatcggtgcgggcctcttcgctattacgccagctggcgaaagggggatgtgctgcaaggcgattaagttgggtaacgccagggttttcccagtcacgacgttgtaaaacgacggccagtgaattgtaatacgactcactatagggcgaattgggcccgacgtcgcatgcaactattagtgaggcttcgggagtggttgtctcggttgtctcattcagactcgttgtgttgtatctatatctatataaacactcttgtccctcaatcccactgccatcttttgctaaacttgccgccaatatgaaactcatctccctcatcaccgtcgctaccaccgctctggcggctgtcggagacaagtacaagctgacctataccagatcagacgcccaatcggtcgaatctctgcccgtcacctaccaagatgacctgatcaccgcctccaccgacggcgaacccatcaccatcaccgagggcgagggcaacaccttctctgttaacgacatgcccatcgcctatctggagctgcaggctttgttctggaccggcgactacggctacaagctccagggctcggtctttgacattgccgccgatggaacctttgagctgagagacggccccaaggagtactactattgcactcctcaccctgagcgaaacgtcatctacgtcatcaacagccccgactactccaagtgtcggttcaagcgtaccatcaagttccacgctgaaaagatctaagtggtaatcgaccgactaaccatttttagctgacaaacacttgctaactcctataacgaatgaatgactaacttggcatattgttaccaagtattacttgggatatagttgagtgtaaccattgctaagaatccaaactggagcttctaaaggtctgggagtcgccgtatgtgttcatatcgaaatcaaagaaatcataatcgcaacagaattcaaaatcaagcagattaatatccattattgtactcggatcgtgacatatctgatatgatctcggatatgatctctgactgtttactgggagatttgttgaagatttgttgaggttatctgaaaagtagacaatagagacaaaatgacgatatcaagaactgaatcgggccgaaatactcggtatcattcccttcagcagtaactgtattgctctatcaatgcgacgagatacctccacaattaatactgtatacgctctaccactcatatctccaatgctaaaatatattcatgcccaggacctctgtgcactgctatgcagcacagtgttgtcgattgaattggtcgtgtctggtccctgatgctctgtgtctcgctgactagtccttccatccagacctcgtcattatctgataggcaacaagttctgctctctcacaccctgccgacacaagggacactcgggcttctctctcacccattcggaaatacagtccttaattaagttgcgacacatgtcttgatagtatcttgaattctctctcttgagcttttccataacaagttcttctgcctccaggaagtccatgggtggtttgatcatggttttggtgtagtggtagtgcagtggtggtattgtgactggggatgtagttgagaataagtcatacacaagtcagctttcttcgagcctcatataagtataagtagttcaacgtattagcactgtacccagcatctccgtatcgagaaacacaacaacatgccccattggacagatcatgcggatacacaggttgtgcagtatcatacatactcgatcagacaggtcgtctgaccatcatacaagctgaacaagcgctccatacttgcacgctctctatatacacagttaaattacatatccatagtctaacctctaacagttaatcttctggtaagcctcccagccagccttctggtatcgcttggcctcctcaataggatctcggttctggccgtacagacctcggccgacaattatgatatccgttccggtagacatgacatcctcaacagttcggtactgctgtccgagagcgtctcccttgtcgtcaagacccaccccgggggtcagaataagccagtcctcagagtcgcccttaggtcggttctgggcaatgaagccaaccacaaactcggggtcggatcgggcaagctcaatggtctgcttggagtactcgccagtggccagagagcccttgcaagacagctcggccagcatgagcagacctctggccagcttctcgttgggagaggggactaggaactccttgtactgggagttctcgtagtcagagacgtcctccttcttctgttcagagacagtttcctcggcaccagctcgcaggccagcaatgattccggttccgggtacaccgtgggcgttggtgatatcggaccactcggcgattcggtgacaccggtactggtgcttgacagtgttgccaatatctgcgaactttctgtcctcgaacaggaagaaaccgtgcttaagagcaagttccttgagggggagcacagtgccggcgtaggtgaagtcgtcaatgatgtcgatatgggttttgatcatgcacacataaggtccgaccttatcggcaagctcaatgagctccttggtggtggtaacatccagagaagcacacaggttggttttcttggctgccacgagcttgagcactcgagcggcaaaggcggacttgtggacgttagctcgagcttcgtaggagggcattttggtggtgaagaggagactgaaataaatttagtctgcagaactttttatcggaaccttatctggggcagtgaagtatatgttatggtaatagttacgagttagttgaacttatagatagactggactatacggctatcggtccaaattagaaagaacgtcaatggctctctgggcgtcgcctttgccgacaaaaatgtgatcatgatgaaagccagcaatgacgttgcagctgatattgttgtcggccaaccgcgccgaaaacgcagctgtcagacccacagcctccaacgaagaatgtatcgtcaaagtgatccaagcacactcatagttggagtcgtactccaaaggcggcaatgacgagtcagacagatactcgtcgaccttttccttgggaaccaccaccgtcagcccttctgactcacgtattgtagccaccgacacaggcaacagtccgtggatagcagaatatgtcttgtcggtccatttctcaccaactttaggcgtcaagtgaatgttgcagaagaagtatgtgccttcattgagaatcggtgttgctgatttcaataaagtcttgagatcagtttggccagtcatgttgtggggggtaattggattgagttatcgcctacagtctgtacaggtatactcgctgcccactttatactttttgattccgctgcacttgaagcaatgtcgtttaccaaaagtgagaatgctccacagaacacaccccagggtatggttgagcaaaaaataaacactccgatacggggaatcgaaccccggtctccacggttctcaagaagtattcttgatgagagcgtatcgatgagcctaaaatgaacccgagtatatctcataaaattctcggtgagaggtctgtgactgtcagtacaaggtgccttcattatgccctcaaccttaccatacctcactgaatgtagtgtacctctaaaaatgaaatacagtgccaaaagccaaggcactgagctcgtctaacggacttgatatacaaccaattaaaacaaatgaaaagaaatacagttctttgtatcatttgtaacaattaccctgtacaaactaaggtattgaaatcccacaatattcccaaagtccacccctttccaaattgtcatgcctacaactcatataccaagcactaacctaccgttt

SEQ ID NO: 242 - DNA, 30 bp, Artificial Sequence
  Primer ACBPFii
gggaccagttttcactccagatcagctcac

SEQ ID NO: 243 - DNA, 34 bp, Artificial Sequence
  Primer ACBPRii
gggtctggacaagagcaatgtactcctgctcagc

SEQ ID NO: 244 - DNA, 34 bp, Artificial Sequence
  Primer 3UTR-URA3
gagagaattcaagatactatcaagacatgtgtcg

SEQ ID NO: 245 - DNA, 30 bp, Artificial Sequence
  Primer 3R-ACBPn
ctttgagatagagcacgttgcacatgatgc

SEQ ID NO: 246 - DNA, 20 bp, Artificial Sequence
  Real time PCR primer ef-324F
cgactgtgccatcctcatca

SEQ ID NO: 247 - DNA, 21 bp, Artificial Sequence
  Real time PCR primer ef-392R
tgaccgtccttggagatacca

SEQ ID NO: 248 - DNA, 18 bp, Artificial Sequence
  Real time PCR primer ACB1-378F
cgtcggcgacaacaacac

SEQ ID NO: 249 - DNA, 20 bp, Artificial Sequence
  Real time PCR primer ACB1-474R
ccaggcgtcccacttgtact

SEQ ID NO: 250 - DNA, 21 bp, Artificial Sequence
  Nucleotide portion of TaqMan probe ef-345T
tgctggtggtgttggtgagtt

SEQ ID NO: 251 - DNA, 18 bp, Artificial Sequence
  Nucleotide portion of TaqMan probe ACB1-398T
accgacccggcgccttca

SEQ ID NO: 252 - DNA, 30 bp, Artificial Sequence
  Primer ACBP-F
gatcaaccatggcttccgccgaattcaccg

SEQ ID NO: 253 - DNA, 35 bp, Artificial Sequence; identical to SEQ ID NO: 179
  Primer ACBP-R

SEQ ID NO: 254 - DNA, 8784 bp, Artificial Sequence
  Plasmid pZP2-Pex10
ggccgcaagtgtggatggggaagtgagtgcccggttctgtgtgcacaattggcaatccaagatggatggattcaacacagggatatagcgagctacgtggtggtgcgaggatatagcaacggatatttatgtttgacacttgagaatgtacgatacaagcactgtccaagtacaatactaaacatactgtacatactcatactcgtacccgggcaacggtttcacttgagtgcagtggctagtgctcttactcgtacagtgtgcaatactgcgtatcatagtctttgatgtatatcgtattcattcatgttagttgcgtacgggcgtcgttgcttgtgtgatttttgaggacccatccctttggtatataagtatactctggggttaaggttgcccgtgtagtctaggttatagttttcatgtgaaataccgagagccgagggagaataaacgggggtatttggacttgtttttttcgcggaaaagcgtcgaatcaaccctgcgggccttgcaccatgtccacgacgtgtttctcgccccaattcgccccttgcacgtcaaaattaggcctccatctagacccctccataacatgtgactgtggggaaaagtataagggaaaccatgcaaccatagacgacgtgaaagacggggaggaaccaatggaggccaaagaaatggggtagcaacagtccaggagacagacaaggagacaaggagagggcgcccgaaagatcggaaaaacaaacatgtccaattggggcagtgacggaaacgacacggacacttcagtacaatggaccgaccatctccaagccagggttattccggtatcaccttggccgtaacctcccgctggtacctgatattgtacacgttcacattcaatatactttcagctacaataagagaggctgtttgtcgggcatgtgtgtccgtcgtatggggtgatgtccgagggcgaaattcgctacaagcttaactctggcgcttgtccagtatgaatagacaagtcaagaccagtggtgccatgattgacagggaggtacaagacttcgatactcgagcattactcggacttgtggcgattgaacagacgggcgatcgcttctcccccgtattgccggcgcgccagctgcattaatgaatcggccaacgcgcggggagaggcggtttgcgtattgggcgctcttccgcttcctcgctcactgactcgctgcgctcggtcgttcggctgcggcgagcggtatcagctcactcaaaggcggtaatacggttatccacagaatcaggggataacgcaggaaagaacatgtgagcaaaaggccagcaaaaggccaggaaccgtaaaaaggccgcgttgctggcgtttttccataggctccgcccccctgacgagcatcacaaaaatcgacgctcaagtcagaggtggcgaaacccgacaggactataaagataccaggcgtttccccctggaagctccctcgtgcgctctcctgttccgaccctgccgcttaccggatacctgtccgcctttctcccttcgggaagcgtggcgctttctcatagctcacgctgtaggtatctcagttcggtgtaggtcgttcgctccaagctgggctgtgtgcacgaaccccccgttcagcccgaccgctgcgccttatccggtaactatcgtcttgagtccaacccggtaagacacgacttatcgccactggcagcagccactggtaacaggattagcagagcgaggtatgtaggcggtgctacagagttcttgaagtggtggcctaactacggctacactagaagaacagtatttggtatctgcgctctgctgaagccagttaccttcggaaaaagagttggtagctcttgatccggcaaacaaaccaccgctggtagcggtggtttttttgtttgcaagcagcagattacgcgcagaaaaaaaggatctcaagaagatcctttgatcttttctacggggtctgacgctcagtggaacgaaaactcacgttaagggattttggtcatgagattatcaaaaaggatcttcacctagatccttttaaattaaaaatgaagttttaaatcaatctaaagtatatatgagtaaacttggtctgacagttaccaatgcttaatcagtgaggcacctatctcagcgatctgtctatttcgttcatccatagttgcctgactccccgtcgtgtagataactacgatacgggagggcttaccatctggccccagtgctgcaatgataccgcgagacccacgctcaccggctccagatttatcagcaataaaccagccagccggaagggccgagcgcagaagtggtcctgcaactttatccgcctccatccagtctattaattgttgccgggaagctagagtaagtagttcgccagttaatagtttgcgcaacgttgttgccattgctacaggcatcgtggtgtcacgctcgtcgtttggtatggcttcattcagctccggttcccaacgatcaaggcgagttacatgatcccccatgttgtgcaaaaaagcggttagctccttcggtcctccgatcgttgtcagaagtaagttggccgcagtgttatcactcatggttatggcagcactgcataattctcttactgtcatgccatccgtaagatgcttttctgtgactggtgagtactcaaccaagtcattctgagaatagtgtatgcggcgaccgagttgctcttgcccggcgtcaatacgggataataccgcgccacatagcagaactttaaaagtgctcatcattggaaaacgttcttcggggcgaaaactctcaaggatcttaccgctgttgagatccagttcgatgtaacccactcgtgcacccaactgatcttcagcatcttttactttcaccagcgtttctgggtgagcaaaaacaggaaggcaaaatgccgcaaaaaagggaataagggcgacacggaaatgttgaatactcatactcttcctttttcaatattattgaagcatttatcagggttattgtctcatgagcggatacatatttgaatgtatttagaaaaataaacaaataggggttccgcgcacatttccccgaaaagtgccacctgatgcggtgtgaaataccgcacagatgcgtaaggagaaaataccgcatcaggaaattgtaagcgttaatattttgttaaaattcgcgttaaatttttgttaaatcagctcattttttaaccaataggccgaaatcggcaaaatcccttataaatcaaaagaatagaccgagatagggttgagtgttgttccagtttggaacaagagtccactattaaagaacgtggactccaacgtcaaagggcgaaaaaccgtctatcagggcgatggcccactacgtgaaccatcaccctaatcaagttttttggggtcgaggtgccgtaaagcactaaatcggaaccctaaagggagcccccgatttagagcttgacggggaaagccggcgaacgtggcgagaaaggaagggaagaaagcgaaaggagcgggcgctagggcgctggcaagtgtagcggtcacgctgcgcgtaaccaccacacccgccgcgcttaatgcgccgctacagggcgcgtccattcgccattcaggctgcgcaactgttgggaagggcgatcggtgcgggcctcttcgctattacgccagctggcgaaagggggatgtgctgcaaggcgattaagttgggtaacgccagggttttcccagtcacgacgttgtaaaacgacggccagtgaattgtaatacgactcactatagggcgaattgggcccgacgtcgcatgcgctgatgacactttggtctgaaagagatgcattttgaatcccaaacttgcagtgcccaagtgacatacatctccgcgttttggaaaatgttcagaaacagttgattgtgttggaatggggaatggggaatggaaaaatgactcaagtatcaattccaaaaacttctctggctggcagtacctactgtccatactactgcattttctccagtcaggccactctatactcgacgacacagtagtaaaacccagataatttcgacataaacaagaaaacagacccaataatatttatatatagtcagccgtttgtccagttcagactgtaatagccgaaaaaaaatccaaagtttctattctaggaaaatatattccaatatttttaattcttaatctcatttattttattctagcgaaatacatttcagctacttgagacatgtgatacccacaaatcggattcggactcggttgttcagaagagcatatggcattcgtgctcgcttgttcacgtattcttcctgttccatctcttggccgacaatcacacaaaaatggggttttttttttaattctaatgattcattacagcaaaattgagatatagcagaccacgtattccataatcaccaaggaagttcttgggcgtcttaattaagtcatacacaagtcagctttcttcgagcctcatataagtataagtagttcaacgtattagcactgtacccagcatctccgtatcgagaaacacaacaacatgccccattggacagatcatgcggatacacaggttgtgcagtatcatacatactcgatcagacaggtcgtctgaccatcatacaagctgaacaagcgctccatacttgcacgctctctatatacacagttaaattacatatccatagtctaacctctaacagttaatcttctggtaagcctcccagccagccttctggtatcgcttggcctcctcaataggatctcggttctggccgtacagacctcggccgacaattatgatatccgttccggtagacatgacatcctcaacagttcggtactgctgtccgagagcgtctcccttgtcgtcaagacccaccccgggggtcagaataagccagtcctcagagtcgcccttaggtcggttctgggcaatgaagccaaccacaaactcggggtcggatcgggcaagctcaatggtctgcttggagtactcgccagtggccagagagcccttgcaagacagctcggccagcatgagcagacctctggccagcttctcgttgggagaggggactaggaactccttgtactgggagttctcgtagtcagagacgtcctccttcttctgttcagagacagtttcctcggcaccagctcgcaggccagcaatgattccggttccgggtacaccgtgggcgttggtgatatcggaccactcggcgattcggtgacaccggtactggtgcttgacagtgttgccaatatctgcgaactttctgtcctcgaacaggaagaaaccgtgcttaagagcaagttccttgagggggagcacagtgccggcgtaggtgaagtcgtcaatgatgtcgatatgggttttgatcatgcacacataaggtccgaccttatcggcaagctcaatgagctccttggtggtggtaacatccagagaagcacacaggttggttttcttggctgccacgagcttgagcactcgagcggcaaaggcggacttgtggacgttagctcgagcttcgtaggagggcattttggtggtgaagaggagactgaaataaatttagtctgcagaactttttatcggaaccttatctggggcagtgaagtatatgttatggtaatagttacgagttagttgaacttatagatagactggactatacggctatcggtccaaattagaaagaacgtcaatggctctctgggcgtcgcctttgccgacaaaaatgtgatcatgatgaaagccagcaatgacgttgcagctgatattgttgtcggccaaccgcgccgaaaacgcagctgtcagacccacagcctccaacgaagaatgtatcgtcaaagtgatccaagcacactcatagttggagtcgtactccaaaggcggcaatgacgagtcagacagatactcgtcaaacggtaggttagtgcttggtatatgagttgtaggcatgacaatttggaaaggggtggactttgggaatattgtgggatttcaataccttagtttgtacagggtaattgttacaaatgatacaaagaactgtatttcttttcatttgttttaattggttgtatatcaagtccgttagacgagctcagtgccttggcttttggcactgtatttcatttttagaggtacactacattcagtgaggtatggtaaggttgagggcataatgaaggcaccttgtactgacagtcacagacctctcaccgagaattttatgagatatactcgggttcattttaggctcatcgatgagcctaaaatgaacccgagtatatctcataaaattctcggtgagaggtctgtgactgtcagtacaaggtgccttcattatgccctcaaccttaccatacctcactgaatgtagtgtacctctaaaaatgaaatacagtgccaaaagccaaggcactgagctcgtctaacggacttgatatacaaccaattaaaacaaatgaaaagaaatacagttctttgtatcatttgtaacaattaccctgtacaaactaaggtattgaaatcccacaatattcccaaagtccacccctttccaaattgtcatgcctacaactcatataccaagcactaacctaccgtttaaacagtgtacgcagatctactatagaggaacatttaaattgccccggagaagacggccaggccgcctagatgacaaattcaacaactcacagctgactttctgccattgccactaggggggggcctttttatatggccaagccaagctctccacgtcggttgggctgcacccaacaataaatgggtagggttgcaccaacaaagggatgggatggggggtagaagatacgaggataacggggctcaatggcacaaataagaacgaatactgccattaagactcgtgatccagcgactgacaccattgcatcatctaagggcctcaaaactacctcggaactgctgcgctgatctggacaccacagaggttccgagcactttaggttgcaccaaatgtcccaccaggtgcaggcagaaaacgctggaacagcgtgtacagtttgtcttaacaaaaagtgagggcgctgaggtcgagcagggtggtgtgacttgttatagcctttagagctgcgaaagcgcgtatggatttggctcatcaggccagattgagggtctgtggacacatgtcatgttagtgtacttcaatcgccccctggatatagccccgacaataggccgtggcctcatttttttgccttccgcacatttccattgctcggtacccacaccttgcttctcctgcacttgccaaccttaatactggtttacattgaccaacatcttacaagcggggggcttgtctagggtatatataaacagtggctctcccaatcggttgccagtctcttttttcctttctttccccacagattcgaaatctaaactacacatcacagaattccgagccgtgagtatccacgacaagatcagtgtcgagacgacgcgttttgtgtaatgacacaatccgaaagtcgctagcaacacacactctctacacaaactaacccagctctggtaccatggggggaagttcacatgcattcgctggtgaatctgatctgacactacaactacacaccaggtccaacatgagcgacaatacgacaatcaaaaagccgatccgacccaaaccgatccggacggaacgcctgccttacgctggggccgcagaaatcatccgagccaaccagaaagaccactactttgagtccgtgcttgaacagcatctcgtcacgtttctgcagaaatggaagggagtacgatttatccaccagtacaaggaggagctggagacggcgtccaagtttgcatatctcggtttgtgtacgcttgtgggctccaagactctcggagaagagtacaccaatctcatgtacactatcagagaccgaacagctctaccgggggtggtgagacggtttggctacgtgctttccaacactctgtttccatacctgtttgtgcgctacatgggcaagttgcgcgccaaactgatgcgcgagtatccccatctggtggagtacgacgaagatgagcctgtgcccagcccggaaacatggaaggagcgggtcatcaagacgtttgtgaacaagtttgacaagttcacggcgctggaggggtttaccgcgatccacttggcgattttctacgtctacggctcgtactaccagctcagtaagcggatctggggcatgcgttatgtatttggacaccgactggacaagaatgagcctcgaatcggttacgagatgctcggtctgctgattttcgcccggtttgccacgtcatttgtgcagacgggaagagagtacctcggagcgctgctggaaaagagcgtggagaaagaggcaggggagaaggaagatgaaaaggaagcggttgtgccgaaaaagaagtcgtcaattccgttcattgaggatacagaaggggagacggaagacaagatcgatctggaggaccctcgacagctcaagttcattcctgaggcgtccagagcgtgcactctgtgtctgtcatacattagtgcgccggcatgtacgccatgtggacactttttctgttgggactgtatttccgaatgggtgagagagaagcccgagtgtcccttgtgtcggcagggtgtgagagagcagaacttgttgcctatcagataatgacgaggtctggc

SEQ ID NO: 255 - DNA, 7899 bp, Artificial Sequence
  Plasmid pZP2-YACBP
ggccgcaagtgtggatggggaagtgagtgcccggttctgtgtgcacaattggcaatccaagatggatggattcaacacagggatatagcgagctacgtggtggtgcgaggatatagcaacggatatttatgtttgacacttgagaatgtacgatacaagcactgtccaagtacaatactaaacatactgtacatactcatactcgtacccgggcaacggtttcacttgagtgcagtggctagtgctcttactcgtacagtgtgcaatactgcgtatcatagtctttgatgtatatcgtattcattcatgttagttgcgtacgggcgtcgttgcttgtgtgatttttgaggacccatccctttggtatataagtatactctggggttaaggttgcccgtgtagtctaggttatagttttcatgtgaaataccgagagccgagggagaataaacgggggtatttggacttgtttttttcgcggaaaagcgtcgaatcaaccctgcgggccttgcaccatgtccacgacgtgtttctcgccccaattcgccccttgcacgtcaaaattaggcctccatctagacccctccataacatgtgactgtggggaaaagtataagggaaaccatgcaaccatagacgacgtgaaagacggggaggaaccaatggaggccaaagaaatggggtagcaacagtccaggagacagacaaggagacaaggagagggcgcccgaaagatcggaaaaacaaacatgtccaattggggcagtgacggaaacgacacggacacttcagtacaatggaccgaccatctccaagccagggttattccggtatcaccttggccgtaacctcccgctggtacctgatattgtacacgttcacattcaatatactttcagctacaataagagaggctgtttgtcgggcatgtgtgtccgtcgtatggggtgatgtccgagggcgaaattcgctacaagcttaactctggcgcttgtccagtatgaatagacaagtcaagaccagtggtgccatgattgacagggaggtacaagacttcgatactcgagcattactcggacttgtggcgattgaacagacgggcgatcgcttctcccccgtattgccggcgcgccagctgcattaatgaatcggccaacgcgcggggagaggcggtttgcgtattgggcgctcttccgcttcctcgctcactgactcgctgcgctcggtcgttcggctgcggcgagcggtatcagctcactcaaaggcggtaatacggttatccacagaatcaggggataacgcaggaaagaacatgtgagcaaaaggccagcaaaaggccaggaaccgtaaaaaggccgcgttgctggcgtttttccataggctccgcccccctgacgagcatcacaaaaatcgacgctcaagtcagaggtggcgaaacccgacaggactataaagataccaggcgtttccccctggaagctccctcgtgcgctctcctgttccgaccctgccgcttaccggatacctgtccgcctttctcccttcgggaagcgtggcgctttctcatagctcacgctgtaggtatctcagttcggtgtaggtcgttcgctccaagctgggctgtgtgcacgaaccccccgttcagcccgaccgctgcgccttatccggtaactatcgtcttgagtccaacccggtaagacacgacttatcgccactggcagcagccactggtaacaggattagcagagcgaggtatgtaggcggtgctacagagttcttgaagtggtggcctaactacggctacactagaagaacagtatttggtatctgcgctctgctgaagccagttaccttcggaaaaagagttggtagctcttgatccggcaaacaaaccaccgctggtagcggtggtttttttgtttgcaagcagcagattacgcgcagaaaaaaaggatctcaagaagatcctttgatcttttctacggggtctgacgctcagtggaacgaaaactcacgttaagggattttggtcatgagattatcaaaaaggatcttcacctagatccttttaaattaaaaatgaagttttaaatcaatctaaagtatatatgagtaaacttggtctgacagttaccaatgcttaatcagtgaggcacctatctcagcgatctgtctatttcgttcatccatagttgcctgactccccgtcgtgtagataactacgatacgggagggcttaccatctggccccagtgctgcaatgataccgcgagacccacgctcaccggctccagatttatcagcaataaaccagccagccggaagggccgagcgcagaagtggtcctgcaactttatccgcctccatccagtctattaattgttgccgggaagctagagtaagtagttcgccagttaatagtttgcgcaacgttgttgccattgctacaggcatcgtggtgtcacgctcgtcgtttggtatggcttcattcagctccggttcccaacgatcaaggcgagttacatgatcccccatgttgtgcaaaaaagcggttagctccttcggtcctccgatcgttgtcagaagtaagttggccgcagtgttatcactcatggttatggcagcactgcataattctcttactgtcatgccatccgtaagatgcttttctgtgactggtgagtactcaaccaagtcattctgagaatagtgtatgcggcgaccgagttgctcttgcccggcgtcaatacgggataataccgcgccacatagcagaactttaaaagtgctcatcattggaaaacgttcttcggggcgaaaactctcaaggatcttaccgctgttgagatccagttcgatgtaacccactcgtgcacccaactgatcttcagcatcttttactttcaccagcgtttctgggtgagcaaaaacaggaaggcaaaatgccgcaaaaaagggaataagggcgacacggaaatgttgaatactcatactcttcctttttcaatattattgaagcatttatcagggttattgtctcatgagcggatacatatttgaatgtatttagaaaaataaacaaataggggttccgcgcacatttccccgaaaagtgccacctgatgcggtgtgaaataccgcacagatgcgtaaggagaaaataccgcatcaggaaattgtaagcgttaatattttgttaaaattcgcgttaaatttttgttaaatcagctcattttttaaccaataggccgaaatcggcaaaatcccttataaatcaaaagaatagaccgagatagggttgagtgttgttccagtttggaacaagagtccactattaaagaacgtggactccaacgtcaaagggcgaaaaaccgtctatcagggcgatggcccactacgtgaaccatcaccctaatcaagttttttggggtcgaggtgccgtaaagcactaaatcggaaccctaaagggagcccccgatttagagcttgacggggaaagccggcgaacgtggcgagaaaggaagggaagaaagcgaaaggagcgggcgctagggcgctggcaagtgtagcggtcacgctgcgcgtaaccaccacacccgccgcgcttaatgcgccgctacagggcgcgtccattcgccattcaggctgcgcaactgttgggaagggcgatcggtgcgggcctcttcgctattacgccagctggcgaaagggggatgtgctgcaaggcgattaagttgggtaacgccagggttttcccagtcacgacgttgtaaaacgacggccagtgaattgtaatacgactcactatagggcgaattgggcccgacgtcgcatgcgctgatgacactttggtctgaaagagatgcattttgaatcccaaacttgcagtgcccaagtgacatacatctccgcgttttggaaaatgttcagaaacagttgattgtgttggaatggggaatggggaatggaaaaatgactcaagtatcaattccaaaaacttctctggctggcagtacctactgtccatactactgcattttctccagtcaggccactctatactcgacgacacagtagtaaaacccagataatttcgacataaacaagaaaacagacccaataatatttatatatagtcagccgtttgtccagttcagactgtaatagccgaaaaaaaatccaaagtttctattctaggaaaatatattccaatatttttaattcttaatctcatttattttattctagcgaaatacatttcagctacttgagacatgtgatacccacaaatcggattcggactcggttgttcagaagagcatatggcattcgtgctcgcttgttcacgtattcttcctgttccatctcttggccgacaatcacacaaaaatggggttttttttttaattctaatgattcattacagcaaaattgagatatagcagaccacgtattccataatcaccaaggaagttcttgggcgtcttaattaagtcatacacaagtcagctttcttcgagcctcatataagtataagtagttcaacgtattagcactgtacccagcatctccgtatcgagaaacacaacaacatgccccattggacagatcatgcggatacacaggttgtgcagtatcatacatactcgatcagacaggtcgtctgaccatcatacaagctgaacaagcgctccatacttgcacgctctctatatacacagttaaattacatatccatagtctaacctctaacagttaatcttctggtaagcctcccagccagccttctggtatcgcttggcctcctcaataggatctcggttctggccgtacagacctcggccgacaattatgatatccgttccggtagacatgacatcctcaacagttcggtactgctgtccgagagcgtctcccttgtcgtcaagacccaccccgggggtcagaataagccagtcctcagagtcgcccttaggtcggttctgggcaatgaagccaaccacaaactcggggtcggatcgggcaagctcaatggtctgcttggagtactcgccagtggccagagagcccttgcaagacagctcggccagcatgagcagacctctggccagcttctcgttgggagaggggactaggaactccttgtactgggagttctcgtagtcagagacgtcctccttcttctgttcagagacagtttcctcggcaccagctcgcaggccagcaatgattccggttccgggtacaccgtgggcgttggtgatatcggaccactcggcgattcggtgacaccggtactggtgcttgacagtgttgccaatatctgcgaactttctgtcctcgaacaggaagaaaccgtgcttaagagcaagttccttgagggggagcacagtgccggcgtaggtgaagtcgtcaatgatgtcgatatgggttttgatcatgcacacataaggtccgaccttatcggcaagctcaatgagctccttggtggtggtaacatccagagaagcacacaggttggttttcttggctgccacgagcttgagcactcgagcggcaaaggcggacttgtggacgttagctcgagcttcgtaggagggcattttggtggtgaagaggagactgaaataaatttagtctgcagaactttttatcggaaccttatctggggcagtgaagtatatgttatggtaatagttacgagttagttgaacttatagatagactggactatacggctatcggtccaaattagaaagaacgtcaatggctctctgggcgtcgcctttgccgacaaaaatgtgatcatgatgaaagccagcaatgacgttgcagctgatattgttgtcggccaaccgcgccgaaaacgcagctgtcagacccacagcctccaacgaagaatgtatcgtcaaagtgatccaagcacactcatagttggagtcgtactccaaaggcggcaatgacgagtcagacagatactcgtcaaacggtaggttagtgcttggtatatgagttgtaggcatgacaatttggaaaggggtggactttgggaatattgtgggatttcaataccttagtttgtacagggtaattgttacaaatgatacaaagaactgtatttcttttcatttgttttaattggttgtatatcaagtccgttagacgagctcagtgccttggcttttggcactgtatttcatttttagaggtacactacattcagtgaggtatggtaaggttgagggcataatgaaggcaccttgtactgacagtcacagacctctcaccgagaattttatgagatatactcgggttcattttaggctcatcgatgagcctaaaatgaacccgagtatatctcataaaattctcggtgagaggtctgtgactgtcagtacaaggtgccttcattatgccctcaaccttaccatacctcactgaatgtagtgtacctctaaaaatgaaatacagtgccaaaagccaaggcactgagctcgtctaacggacttgatatacaaccaattaaaacaaatgaaaagaaatacagttctttgtatcatttgtaacaattaccctgtacaaactaaggtattgaaatcccacaatattcccaaagtccacccctttccaaattgtcatgcctacaactcatataccaagcactaacctaccgtttaaacagtgtacgcagatctactatagaggaacatttaaattgccccggagaagacggccaggccgcctagatgacaaattcaacaactcacagctgactttctgccattgccactaggggggggcctttttatatggccaagccaagctctccacgtcggttgggctgcacccaacaataaatgggtagggttgcaccaacaaagggatgggatggggggtagaagatacgaggataacggggctcaatggcacaaataagaacgaatactgccattaagactcgtgatccagcgactgacaccattgcatcatctaagggcctcaaaactacctcggaactgctgcgctgatctggacaccacagaggttccgagcactttaggttgcaccaaatgtcccaccaggtgcaggcagaaaacgctggaacagcgtgtacagtttgtcttaacaaaaagtgagggcgctgaggtcgagcagggtggtgtgacttgttatagcctttagagctgcgaaagcgcgtatggatttggctcatcaggccagattgagggtctgtggacacatgtcatgttagtgtacttcaatcgccccctggatatagccccgacaataggccgtggcctcatttttttgccttccgcacatttccattgctcggtacccacaccttgcttctcctgcacttgccaaccttaatactggtttacattgaccaacatcttacaagcggggggcttgtctagggtatatataaacagtggctctcccaatcggttgccagtctcttttttcctttctttccccacagattcgaaatctaaactacacatcacagaattccgagccgtgagtatccacgacaagatcagtgtcgagacgacgcgttttgtgtaatgacacaatccgaaagtcgctagcaacacacactctctacacaaactaacccagctctggtaccatggcttccgccgaattcaccgccgctgccgactctgtgcagaagcttcccaagactccttccgacgacgagcttcttgagctctacggactgtacaagcaggccaccgtcggcgacaacaacaccgaccgacccggcgccttcaacttcaaggccaagtacaagtgggacgcctgggacaagctcaagggcaagtctcaggaggaggctgagcaggagtacattgctcttgtccagaccctttccgacaagtacaactaagc
